(19) United States
(12) Patent Application Publication
(10) Pub. No.: US 2014/0154254 A1
(43) Pub. Date: Jun. 5, 2014

(54) HETERODIMERIC IMMUNOGLOBULINS

(71) Applicant: AMGEN INC., Thousand Oaks, CA (US)

(72) Inventors: Gunasekaran Kannan, Thousand Oaks, CA (US); Monica Florio, Thousand Oaks, CA (US); Zhi Liu, Shoreline, WA (US); Wei Yan, Sammamish, WA (US)

(73) Assignee: AMGEN INC., Thousand Oaks, CA (US)

(21) Appl. No.: 14/086,190

(22) Filed: Nov. 21, 2013

Related U.S. Application Data
(60) Provisional application No. 61/779,439, filed on Mar. 13, 2013.
(60) Provisional application No. 61/729,148, filed on Nov. 21, 2012.

(51) Int. Cl. C07K 16/46; C07K 16/18

(52) U.S. Cl. CPC C07K 16/468; C07K 16/18
USPC 424/136.1; 530/387.3; 536/23.53; 435/320.1; 435/328; 435/252.3; 435/254.2; 435/254.22; 435/254.21; 435/252.31; 435/252.33

(57) ABSTRACT

The present application is directed to heterodimeric antibodies and methods of use.

### INCORPORATION BY REFERENCE

[0001] The following applications are hereby incorporated by reference in their entirety: U.S. patent application Ser. No. 11/410,540, filed Apr. 25, 2006, which claims priority to U.S. Provisional Patent Application No. 60/792,645, filed Apr. 17, 2006, U.S. Provisional Patent Application No. 60/782,244, filed Mar. 13, 2006, U.S. Provisional Patent Application No. 60/776,847, filed Feb. 24, 2006, and U.S. Provisional Patent Application No. 60/677,583, filed May 3, 2005; and U.S. patent application Ser. No. 11/411,003 (issued as U.S. Pat. No. 7,592,429), filed Apr. 25, 2006, which claims priority to U.S. Provisional Patent Application No. 60/792,645, filed Apr. 17, 2006, U.S. Provisional Patent Application No. 60/782,244, filed Mar. 13, 2006, U.S. Provisional Patent Application No. 60/776,847, filed Feb. 24, 2006, and U.S. Provisional Patent Application No. 60/677,583, filed May 3, 2005. The following applications also are hereby incorporated by reference: U.S. patent application Ser. No. 12/212,327, filed Sep. 17, 2008, which claims priority to U.S. Provisional Patent Application No. 60/973,024, filed Sep. 17, 2007; and U.S. patent application Ser. No. 12/811,171, filed Jun. 29, 2010, which is a U.S. National Phase Application pursuant to 35 U.S.C. §371 of International Patent Application No. PCT/US08/86864, filed on Dec. 15, 2008, which claims priority to U.S. Provisional Patent Application No. 61/013,917, filed Dec. 14, 2007.

### TECHNICAL FIELD OF THE INVENTION

[0002] The invention generally relates to methods of making and using heterodimeric antibodies for the treatment of disorders associated with low bone mineral density.

### INCORPORATION BY REFERENCE OF MATERIAL SUBMITTED ELECTRONICALLY

[0003] Incorporated by reference in its entirety is a computer-readable nucleotide/amino acid sequence listing submitted concurrently herewith and identified as follows: ASCII (text) file named “47233A1_SubSeqListing.txt,” 919,811 bytes, created on Feb. 6, 2014.

### BACKGROUND OF THE INVENTION

[0004] The development of bispecific antibodies as therapeutic agents for human diseases has great clinical potential. Bispecific antibodies can simultaneously recognize two different antigens, neutralize different pathogenic mediators, recruit different type of effector cells, and modulate signal pathways. However, production of bispecific antibodies has been very challenging. The broad application of bispecific antibodies has been hindered by the difficulties of developing a platform for producing bispecific antibodies that exhibit favorable half-life, high stability, lack of immunogenicity, and feasibilities for large scale manufacturing and purification. Promising bispecific antibodies formats such as DVD-Ig (Dual Variable Domain Ig) (Nature Biotechnology 25, 1290-1297 (2007)); Cross-over Ig [Schaefer W et al (2011) PNAS 108(27): 11187-11192]; Two-in-One Ig (Science 2009, 323, 1610); BiTE® antibodies [PNAS 92(15):7021-7025; 1995] allow the production of a bispecific antibody, but they do have different kinds of liabilities.

### SUMMARY OF THE INVENTION

[0005] Described herein are methods of generating heterodimeric antibodies from two different preexisting antibodies.

[0006] In one aspect, described herein is a heterodimeric antibody or fragment thereof comprising one or more substitutions in each of the following domains: a first CH₃-domain, a second CH₃-domain, a CH₁-domain, a C_{L}-domain, a V_{H}-domain and a V_{L}-domain, wherein the one or more substitutions introduce charged amino acids that are electrostatically unfavorable to homodimer formation and electrostatically favorable to heterodimer formation.

[0007] In some variations, the first CH3-domain or the second CH3-domain comprises an amino acid sequence differing from wild-type IgG amino acid sequence such that one or more positive-charged amino acids (e.g., lysine, histidine and arginine) in the wild-type human IgG amino acid sequence are replaced with one or more negative-charged amino acids (e.g., aspartic acid and glutamic acid) at the corresponding position(s) in the CH3 domain. Alternatively, the first CH3-domain or the second CH3-domain comprises an amino acid sequence differing from wild-type IgG amino acid sequence such that one or more negative-charged amino acids in the wild-type human IgG amino acid sequence are replaced with one or more positive-charged amino acids at the corresponding position(s) in the CH3 domain.

[0008] In some variations, the CH1-domain or the CL-domain comprises an amino acid sequence differing from wild-type IgG amino acid sequence such that one or more positive-charged amino acids in wild-type IgG amino acid sequence are replaced with one or more negative-charged amino acids. Alternatively, the CH1-domain or the CL-domain comprises an amino acid sequence differing from wild-type IgG amino acid sequence such that one or more negative-charged amino acids in wild-type IgG amino acid sequence are replaced with one or more positive-charged amino acids.

[0009] The VH-domain or the VL-domain of a heterodimeric antibody described herein comprises, in some variations, an amino acid sequence differing from wild-type IgG amino acid sequence such that one or more positive-charged amino acids in wild-type IgG amino acid sequence are replaced with one or more negative-charged amino acids. Alternatively, the VH-domain or the VL-domain comprises an amino acid sequence differing from wild-type IgG amino acid sequence such that one or more negative-charged amino acids in wild-type IgG amino acid sequence are replaced with one or more positive-charged amino acids.

[0010] In another aspect, described herein is a heterodimeric antibody or fragment thereof comprising a heavy chain comprising (a) a first amino acid substitution at an AHo position selected from the group consisting of AHo positions 42-50 that introduces a charged amino acid at said position, (b) a second amino acid substitution at a position selected from the group consisting of positions 126-213 (EU numbering) that introduces a charged amino acid at said position, (c) a third amino acid substitution at a position selected from the group consisting of positions 352-360 (EU numbering) that introduces a charged amino acid at said position, and (d) a fourth amino acid substitution at a position selected from the group consisting of positions 395-403 (EU numbering) that introduces a charged amino acid, wherein the charged amino acid of (a) has the same charge as the charged amino acid of (b), and wherein the charged amino acids of (c) and (d) have an opposite charge of the charged amino acids of (a) and (b).

[0011] In some embodiments, the first amino acid substitution is at AHo position 46, the second amino acid substitution is at EU position 183, the third amino acid substitution is at EU position 356 and the fourth amino acid substitution is at EU position 399. In some embodiments, glutamine at AHo position 46 is replaced with glutamic acid, serine at EU position 183 is replaced with glutamic acid, glutamic acid at EU position 356 is replaced with lysine, and aspartic acid at EU position 399 is replaced with lysine.

[0012] In another aspect, described herein is an antibody or fragment thereof comprising a heavy chain comprising (a) a first amino acid substitution at an AHo position selected from the group consisting of AHo positions 35-43 that introduces a charged amino acid at said position, (b) a second amino acid substitution at a position selected from the group consisting of positions 126-213 (EU numbering) that introduces a charged amino acid at said position, (c) a third amino acid substitution at a position selected from the group consisting of positions 388-398 (EU numbering) that introduces a charged amino acid at said position, and (d) a fourth amino acid substitution at a position selected from the group consisting of positions 404-413 (EU numbering) that introduces a charged amino acid, wherein the charged amino acids of (c) and (d) have an opposite charge of the charged amino acids of (a) and (b). In some embodiments, the glutamine at AHo position 46 is replaced with lysine, serine at EU position 183 is replaced with lysine, lysine at EU position 392 is replaced with aspartic acid and lysine at EU position 409 is replaced with aspartic acid.

[0013] In yet another aspect, described herein is an antibody or fragment comprising a light chain comprising (a) a first amino acid substitution at an AHo position selected from the group consisting of AHo positions 42-50 that introduces a charged amino acid at said position, and (b) a second amino acid substitution at a position selected from the group consisting of positions 126-213 (EU numbering) that introduces a charged amino acid at said position. In some embodiments, glutamine at AHo position 46 is replaced with glutamic acid and serine at EU position 176 is replaced with glutamic acid.

[0014] In another aspect, described herein is an antibody comprising a heavy chain comprising (a) a first amino acid substitution at an AHo position selected from the group consisting of AHo positions 42-50 that introduces a charged amino acid at said position, (b) a second amino acid substitution at a position selected from the group consisting of positions 126-213 (EU numbering) that introduces a charged amino acid at said position, (c) a third amino acid substitution at a position selected from the group consisting of positions 352-360 (EU numbering) that introduces a charged amino acid at said position, and (d) a fourth amino acid substitution at a position selected from the group consisting of positions 395-403 (EU numbering) that introduces a charged amino acid, wherein the charged amino acids of (a) and (b) have a negative-charge and the charged amino acids of (c) and (d) have a positive charge. In some embodiments, the first amino acid substitution is at position AHo 46, the second amino acid substitution is at EU position 183, the third amino acid substitution is at EU position 356 and the fourth amino acid substitution is at EU position 399. In some embodiments, the antibody comprises a light chain comprising positive-charged amino acids at AHo position 46 and EU position 176.

[0015] In still another aspect, described herein is a heterodimeric antibody comprising a first heavy chain and a second heavy chain and a first light chain and a second light chain, wherein the first heavy chain comprises amino acid substitutions at AHo position 46 and EU positions 183, 356 and 399, wherein the second heavy chain comprises amino acid substitutions at AHo position 46 and EU positions 183, 392 and 409, and wherein the first and second light chains comprise an amino acid substitution at AHo position 46 and EU position 176, wherein the amino acid substitutions introduce a charged amino acid at said positions. In some embodiments, the glutamine at position AHo 46 of the first heavy chain is replaced with glutamic acid, the glutamine at position AHo 46 of the second heavy chain is replaced with lysine, the glutamine at position AHo 46 of the first light chain is replaced with lysine, the glutamine at position AHo 46 of the second light chain is replaced with glutamic acid, the serine at EU position 183 of the first heavy chain is replaced with glutamic acid, the glutamic acid at EU position 356 of the first heavy chain is replaced with lysine, the glutamic acid at EU position 399 of the first heavy chain is replaced with lysine, the serine at EU position 183 of the second heavy chain is replaced with lysine, the lysine at EU position 392 of the second heavy chain is replaced with aspartic acid, and the lysine at EU position 409 of the second heavy chain is replaced with aspartic acid.

[0016] In some or any of the embodiments described herein, the antibody binds to a region of sclerostin comprising amino acids 86-111 of SEQ ID NO: 1.

[0017] Also described herein is a heterodimeric antibody that binds to a region of sclerostin comprising amino acids 86-111 of SEQ ID NO: 1, wherein the antibody comprises a first heavy chain and a first light chain comprising a sclerostin-binding portion and a second heavy chain and a second light chain comprising a DKK1-binding portion, wherein the first heavy chain comprises amino acid substitutions at AHo position 46 and EU positions 183, 356 and 399, wherein the second heavy chain comprises amino acid substitutions at AHo position 46 and EU positions 183, 392 and 409, wherein the first and second light chains comprise an amino acid substitution at AHo position 46 and EU position 176, and wherein the amino acid substitutions introduce a charged amino acid at said positions.

[0018] In yet another aspect, described herein is a heterodimeric antibody that binds to a region of sclerostin comprising amino acids 86-111 of SEQ ID NO: 1, the antibody comprising a first heavy chain and a first light chain comprising a sclerostin-binding portion and a second heavy chain and a second light chain comprising a DKK1-binding portion, wherein the first heavy chain comprises amino acid substitutions at EU positions 183, 356 and 399, wherein the second heavy chain comprises amino acid substitutions at EU positions 183, 392 and 409, and wherein the first and second light chains comprise an amino acid substitution at EU position 176, wherein the amino acid substitutions introduce a charged amino acid at said positions.

[0019] Another aspect of the invention relates to a heterodimeric antibody that binds sclerostin and DKK-1, comprising a first heavy chain comprising a heavy chain variable region amino acid sequence of any one of the sclerostin antibodies described herein and comprising amino acid substitutions at EU positions 183, 356 and 399 of the first heavy chain, a second heavy chain comprising a heavy chain variable region amino acid sequence of any one of the DKK-1 antibodies described herein and comprising amino acid substitutions at EU positions 183, 392 and 409 of the second heavy chain, a first light chain comprising a light chain variable region amino acid sequence of any one of the sclerostin antibodies described herein and comprising an amino acid substitution at EU position 176 of the first light chain, and a second light chain comprising a light chain variable region amino acid sequence of any of the DKK-1 antibodies described herein and comprising an amino acid substitution at EU position 176 of the second light chain; wherein the amino acid substitutions introduce a charged amino acid at said positions.

[0020] Another aspect of the invention relates to a heterodimeric antibody that binds sclerostin and DKK-1, comprising a first heavy chain comprising a variable region amino acid sequence selected from the group consisting of SEQ ID NOs: 378 and 366 and comprising amino acid substitutions at EU positions 183, 356 and 399 of the first heavy chain, a second heavy chain comprising a variable region amino acid sequence selected from the group consisting of SEQ ID NOs: 1003 and 974 and comprising amino acid substitutions at EU positions 183, 392 and 409 of the second heavy chain, a first light chain comprising a variable region amino acid sequence selected from the group consisting of SEQ ID NOs: 376 and 364 and comprising an amino acid substitution at EU position 176 of the first light chain, and a second light chain comprising a variable region amino acid sequence selected from the group consisting of SEQ ID NOs: 1002 and 978 and comprising an amino acid substitution at EU position 176 of the second light chain; wherein the amino acid substitutions introduce a charged amino acid at said positions.

[0021] In another aspect, described herein is an antibody that binds to a region of sclerostin comprising amino acids 86-111 of SEQ ID NO: 1, wherein the antibody comprises substitutions in each of the following domains: a first CH3-domain, a second CH3-domain, a CH1-domain, and a CL-domain, wherein the one or more substitutions introduce charged amino acids that are electrostatically unfavorable to homodimer formation and electrostatically favorable to heterodimer formation.

[0022] Also described herein is an antibody that binds to a region of sclerostin comprising amino acids 86-111 of SEQ ID NO: 1, wherein the antibody comprises a heavy chain having a CH3 domain comprising one or more amino acid substitutions, wherein the one or more substitutions introduce charged amino acids that are electrostatically unfavorable to homodimer formation and electrostatically favorable to heterodimer formation. In some embodiments, a negative charged amino acid in the CH3 domain (e.g., at EU position D399, E356 or E357) is substituted with a positive charged amino acid. In some embodiments, amino acids at EU positions D399, E356 and E357 are substituted with a positive charged amino acid (e.g., lysine).

[0023] In alternative embodiments, a positive charged amino acid in the CH3 domain (e.g., at EU position K370, K392 or K409) is substituted with a negative charged amino acid. In some embodiments, amino acids as EU positions K370, K392 and K409 are substituted with a negative charged amino acid (e.g., aspartic acid).

[0024] The heterodimeric antibody is, in some embodiments, an antibody, a bispecific antibody, a monospecific monovalent antibody, a bispecific maxibody, a monobody, a peptibody, a bispecific peptibody, a monovalent peptibody or a receptor fusion protein.

[0025] Nucleic acids comprising a nucleotide sequence encoding any of the heterodimeric antibodies described herein are also provided, as well as vectors and host cells comprising the nucleic acid (or vector).

[0026] Another aspect of the invention relates to method of increasing bone mineral density in a mammalian subject comprising administering a heterodimeric antibody described herein to the subject in an amount effective to increase bone mineral density in the subject. The invention also includes methods of using heterodimeric antibodies described herein for increasing bone mineral density. Methods of using as described herein can alternatively be characterized as uses of the heterodimeric antibodies for increasing bone mineral density.

[0027] The invention also includes compositions comprising a heterodimeric antibody described herein and a pharmaceutically acceptable carrier, diluent or adjuvant. In some embodiments, less than 5% (or less than 4%, or less than 3%, or less than 2% or less than 1% or less) of the antibody in the composition is in aggregate form after two weeks of storage at about 4° C. The amount of antibody aggregation in the composition can be determined, for example, by Size Seclusion Chromatography (SEC) or Dynamic Light Scattering (DLS).

[0028] In another aspect, described herein is a composition comprising a heterodimeric antibody or fragment thereof and a pharmaceutically acceptable carrier, diluent or adjuvant, the heterodimeric antibody or fragment thereof comprising one or more substitutions in each of the following domains: a first CH₃-domain, a second CH₃-domain, a CH₁-domain, a C_{L}-domain, a V_{H}-domain and a V_{L}-domain, wherein the one or more substitutions introduce charged amino acids that are electrostatically unfavorable to homodimer formation and electrostatically favorable to heterodimer formation; wherein less than 5% of the antibody or fragment in the composition is in aggregate form after two weeks of storage at about 4° C.

[0029] In another aspect, described herein is a composition comprising a heterodimeric antibody that binds to a region of sclerostin comprising amino acids 86-111 of SEQ ID NO: 1 and a pharmaceutically acceptable carrier, diluent or adjuvant, the antibody comprising substitutions in each of the following domains: a first CH₃-domain, a second CH₃-domain, a CH₁-domain, and a C_{L}-domain, wherein the one or more substitutions introduce charged amino acids that are electrostatically unfavorable to homodimer formation and electrostatically favorable to heterodimer formation; wherein less than 5% of the antibody in the composition is in aggregate form after two weeks of storage at about 4° C.

[0030] The section headings used herein are for organizational purposes only and are not to be construed as limiting the subject matter described. All references cited within the body of this specification are expressly incorporated by reference in their entirety.

[0031] Standard techniques may be used for recombinant DNA, oligonucleotide synthesis, tissue culture and transformation, protein purification, etc. Enzymatic reactions and purification techniques may be performed according to the manufacturer's specifications or as commonly accomplished in the art or as described herein. The following procedures and techniques may be generally performed according to conventional methods well known in the art and as described in various general and more specific references that are cited and discussed throughout the specification. See, e.g., Sambrook et al., 2001, Molecular Cloning: A Laboratory Manuel, 3rd ed., Cold Spring Harbor Laboratory Press, cold Spring Harbor, N.Y., which is incorporated herein by reference for any purpose. Unless specific definitions are provided, the nomenclature used in connection with, and the laboratory procedures and techniques of, analytic chemistry, organic chemistry, and medicinal and pharmaceutical chemistry described herein are those well known and commonly used in the art. Standard techniques may be used for chemical synthesis, chemical analyses, pharmaceutical preparation, formulation, and delivery and treatment of patients.

### BRIEF DESCRIPTION OF THE FIGURES

[0032] FIG. 1 illustrates the in vivo study design for the following heterodimeric antibodies: (1) Ab23-Ab6.147 v2, (2) Ab5-Ab6.37.5 v1, and (3) Ab5-Ab6.147.

[0033] FIG. 2 compares percentage of bone mass density (BMD) increase in lumbar vertebrae and leg in mice between monospecific Ig (Ab5), bispecific DVD (6.147-Ab23) and heterodimeric antibodies (1, 2, & 3) at week 3.

[0034] FIGS. 3A-3D show the pharmacokinetic (PK) profiles of four sclerostin-DKK1 heterodimeric antibodies (i.e., Ab23-6.37.5 v1, Ab5-6.37.5 v1, Ab5-6.147 v2 and Ab23-6.147 v2).

[0035] FIGS. 4A-4F: Configurations of bispecific antibody variants using different approaches (a) A pair of charged residues K/D in variable regions binding to antigen A combined with a pair of charged residues D/K in C_{H}1/CL to enforce the LC to pair with its cognate HC; A pair of charged residues D/K in variable regions binding to antigen B combined with a pair of charged residues K/D in C_{H}1/CL to enforce the LC to pair with its cognate HC. The heterodimerizing charge residues in C_{H}3 domains are also indicated. (b) A pair of charged residues D/K in variable regions binding to antigen A combined with two pairs of charged residues KK/DD in C_{H}1/CL to enforce the LC to pair with its cognate HC; A pair of charged residues K/D in variable regions binding to antigen B combined with two pairs of charged residues DD/KK in C_{H}1/CL to enforce the LC to pair with its cognate HC. The charge residues for heterodimerization in C_{H}3 domains are also indicated. (c) Two pairs of charged residues KK/DD in variable regions binding to antigen A combined with one pair of charged residues D/K in C_{H}1/CL to enforce the LC to pair with its cognate HC; two pairs of charged residues DD/KK in variable regions binding to antigen B combined with one pair of charged residues K/D in C_{H}1/CL to enforce the LC to pair with its cognate HC. The charge residues for heterodimerization in C_{H}3 domains are also indicated. (d) Two pairs of charged residues KK/DD in variable regions binding to antigen A combined with two pairs of charged residues DD/KK in C_{H}1/CL to enforce the LC to pair with its cognate HC; two pairs of charged residues DD/KK in variable regions binding to antigen B combined with two pair of charged residues KK/DD in C_{H}1/CL to enforce the LC to pair with its cognate HC. The charge residues for heterodimerization in C_{H}3 domains are also indicated. (e) One pair of charged residues K/D and one pair of cysteine residues in variable regions binding to antigen A combined with one pair of charged residues D/K in C_{H}1/CL to enforce the LC to pair with its cognate HC; One pair of cysteine residues and one pair of charged residues D/K in variable regions binding to antigen B combined with one pair of charged residues K/D in C_{H}1/CL to enforce the LC to pair with its cognate HC. The charge residues for heterodimerization in C_{H}3 domains are also indicated. © represents the cysteine residue, a disulfide bond formed between two cysteine residues could stabilize the Fab region with correct LC/HC pairing. (f) One pair of charged residues K/D and one pair of small/bulky residues in variable regions binding to antigen A combined with one pair of charged residues D/K in C_{H}1/CL to enforce the LC to pair with its cognate HC; one pair of charged residues D/K and one pair of bulky/small residues and in variable regions binding to antigen B combined with one pair of charged residues K/D in C_{H}1/CL to enforce the LC to pair with its cognate HC. The charge residues for heterodimerization in C_{H}3 domains are also indicated. Protrusive triangle represents the bulky residue; recessive triangle represents the small residue. A knob-into-hole effect may work cooperatively with electrostatic steering effect to guide and stabilize the correct LC/HC pairing.

[0036] FIGS. 5A-5B: Alignment of human heavy chain V and J regions. Numbering is based on the AHo system. Interface residues are highlighted.

[0037] FIGS. 6A-6B: Alignment of human kappa chain V and J regions. Numbering is based on the AHo system. Interface residues are highlighted.

[0038] FIGS. 7A-7B: Alignment of human lambda chain V and J regions. Numbering is based on the AHo system. Interface residues are highlighted.

### DETAILED DESCRIPTION OF THE INVENTION

[0039] The present application is based on the discovery that heterodimeric IgGs could be produced by engineering the heavy chain and light chain of the two different antibodies in such a way that they can assemble exclusively into a heterodimeric antibody without other contaminating species. In one aspect, heterodimeric pairing is achieved by engineering the CH3 regions of two heavy chains so that it forms a heterodimer exclusively. Further, electrostatic steering achieved by engineering interface residues between the light chains (LC) and the heavy chains (HC) prevents mis-pairing of light chains to the non-cognate heavy chains when two different heavy chain and light chain pairs are assembling to form a desired four-chain heterodimeric antibody. As described herein, an exemplary strategy comprises introducing one or more negatively-charged residues (e.g., Asp or Glu) in a first light chain (LC1) and one or more positively-charged residues (e.g., Lys, His or Arg) in the companion heavy chain (HC1) at the LC 1/HC 1 interface while introducing one or more positively-charged residues (e.g., Lys, His or Arg) in a second light chain (LC2) and one or more negatively-charged residues (e.g., Asp or Glu) in the companion heavy chain (HC2) at the LC2/HC2 interface. The electrostatic steering effect directs the LC1 to pair with HCl and LC2 to pair with HC2, as the opposite charged residues (polarity) at the interface attract, while the same type of charged residues (polarity) at an interface causes repulsion, resulting in suppression of the unwanted HC/LC pairings.

[0040] The LC/HC interface residues selected for engineering are buried and spatially close within the VL/VH and CL/CH1 interfaces. The target residues are well conserved among different antibody families. Other ways of engineering the light and heavy chains to form specific heterodimers include replacing one pair of charged residues in the VL/VH interface with a pair of cysteine residues to form a disulfide bond to stabilize the Fab region, replacing one or more hydrophilic residues (e.g., glycine) in the VL/VH interface with a hydrophobic residue (e.g., glutamine), or engineering a pair of bulky/small residues at the VL/VH interface to exert a knob-into-hole effect to accommodate the correct LC/HC pairing. The strategy described herein can be used to efficiently produce a full-length heterodimeric antibody from two preexisting antibodies without using artificial linkers. The resulting heterodimeric antibodies are stable and amenable to commercial manufacturing without excessive aggregation or loss of yield. Because this new version of heterodimeric antibody can target two different antigens or two different epitopes on the same antigen simultaneously, it may have significant potential to uniquely treat many diseases.

[0041] The term “interface” as used herein refers to the association surface that results from interaction one or more amino acids in a first antibody domain with one or more amino acids of a second antibody domain. Exemplary interfaces include, CH1/CL, VH/VL and CH3/CH3. In some embodiments, the interface includes, for example, hydrogen bonds, electrostatic interactions, or salt bridges between the amino acids forming an interface.

[0042] In one aspect, described herein is a heterodimeric antibody or fragment thereof comprising one or more substitutions in each of the following domains: a first CH₃-domain, a second CH₃-domain, a CH₁-domain, a C_{L}-domain, a V_{H}-domain and a V_{L}-domain, wherein the one or more substitutions introduce charged amino acids that are electrostatically unfavorable to homodimer formation and electrostatically favorable to heterodimer formation.

[0043] Heterodimeric antibodies described herein can comprise any constant region. The light chain constant region can be, for example, a kappa- or lambda-type light chain constant region, e.g., a human kappa- or lambda-type light chain constant region. The heavy chain constant region can be, for example, an alpha-, delta-, epsilon-, gamma-, or mu-type heavy chain constant region, e.g., a human alpha-, delta-, epsilon-, gamma-, or mu-type heavy chain constant region. In one embodiment the light or heavy chain constant region is a fragment, derivative, variant, or mutein of a naturally-occurring constant region.

[0044] In some variations, the first CH3-domain or the second CH3-domain comprises an amino acid sequence differing from wild-type IgG amino acid sequence such that one or more positive-charged amino acids (e.g., lysine, histidine and arginine) in the wild-type human IgG amino acid sequence are replaced with one or more negative-charged amino acids (e.g., aspartic acid and glutamic acid) at the corresponding position(s) in the CH3 domain. Alternatively, the first CH3-domain or the second CH3-domain comprises an amino acid sequence differing from wild-type IgG amino acid sequence such that one or more negative-charged amino acids in the wild-type human IgG amino acid sequence are replaced with one or more positive-charged amino acids at the corresponding position(s) in the CH3 domain.

[0045] In some variations, the CH1-domain or the CL-domain comprises an amino acid sequence differing from wild-type IgG amino acid sequence such that one or more positive-charged amino acids in wild-type IgG amino acid sequence are replaced with one or more negative-charged amino acids. Alternatively, the CH1-domain or the CL-domain comprises an amino acid sequence differing from wild-type IgG amino acid sequence such that one or more negative-charged amino acids in wild-type IgG amino acid sequence are replaced with one or more positive-charged amino acids.

[0046] The VH-domain or the VL-domain of a heterodimeric antibody described herein comprises, in some variations, an amino acid sequence differing from wild-type IgG amino acid sequence such that one or more positive-charged amino acids in wild-type IgG amino acid sequence are replaced with one or more negative-charged amino acids. Alternatively, the VH-domain or the VL-domain comprises an amino acid sequence differing from wild-type IgG amino acid sequence such that one or more negative-charged amino acids in wild-type IgG amino acid sequence are replaced with one or more positive-charged amino acids.

[0047] In another aspect, described herein is a heterodimeric antibody or fragment thereof comprising a heavy chain comprising (a) a first amino acid substitution at an AHo position selected from the group consisting of AHo positions 42-50 that introduces a charged amino acid at said position, (b) a second amino acid substitution at a position selected from the group consisting of positions 126-213 (EU numbering) that introduces a charged amino acid at said position, (c) a third amino acid substitution at a position selected from the group consisting of positions 352-360 (EU numbering) that introduces a charged amino acid at said position, and (d) a fourth amino acid substitution at a position selected from the group consisting of positions 395-403 (EU numbering) that introduces a charged amino acid, wherein the charged amino acid of (a) has the same charge as the charged amino acid of (b), and wherein the charged amino acids of (c) and (d) have an opposite charge of the charged amino acids of (a) and (b).

[0048] Herein, the position of particular amino acids within the framework regions of the variable domains (described below) is described using the AHo numbering system. Because antibody CDR amino acid sequence length varies from antibody to antibody, numbering residues based on the linear sequence (assuming the first residue as position 1) leads to framework residues having different position numbers between antibodies. Using Kabat or EU numbering scheme could avoid this conflict and enable comparison of framework positions across antibodies. However, structurally equivalent positions can have a different Kabat or EU number. Similarly, residues having same Kabat number can be present at two different locations on the structure. Annemarie Honegger and Andreas Pluckthun developed a structure based numbering scheme (AHo), which introduces gaps in the CDR regions to minimize deviation from the average structure of the aligned domains. (Honegger, A., and Plückthun, A. (2001). J. Mol. Biol. 309, 657-670) This leads to structurally equivalent positions having the same residue number when two different antibodies are compared. This enables comparison of the effect of substitutions in the variable domain framework region between antibodies. FIGS. 5-7 provide the AHo numbering for human heavy chain, kappa, and lambda variable domain regions, respectively.

[0049] As used herein, the term “framework” or “framework sequence” refers to the region or sequence of a variable region minus the CDRs. Because the exact definition of a CDR sequence can be determined by different systems, the meaning of a framework sequence is subject to correspondingly different interpretations. The six CDRs (CDR-L1, -L2, and -L3 of light chain and CDR-H1, -H2, and -H3 of heavy chain) also divide the framework regions on the light chain and the heavy chain into four sub-regions (FR1, FR2, FR3 and FR4) on each chain, in which CDR1 is positioned between FR1 and FR2, CDR2 between FR2 and FR3, and CDR3 between FR3 and FR4. Without specifying the particular sub-regions as FR1, FR2, FR3 or FR4, a framework region, represents the combined FR's within the variable region of a single, naturally occurring immunoglobulin chain. As used herein, a FR represents one of the four sub-regions, and FRs represents two or more of the four sub-regions constituting a framework region.

[0050] “Substituting” or “substitution of” an amino acid refers to substituting the original amino acid residue for one or more other amino acid residue(s).

[0051] Heavy Chain Modifications

[0052] To maximize efficiency of a particular heavy chain binding to its cognate light chain, both the heavy and light chains contain complimentary amino acid substitutions. By “complimentary amino acid substitutions,” it is meant that a substitution to a positive-charge amino acid in the heavy chain is paired with a negative-charged amino acid substitution to an amino acid in the light chain that associates with the heavy chain residue. Likewise, a substitution to a negative-charge amino acid in the heavy chain is paired with a positive-charged amino acid substitution to an amino acid in the light chain that associates with the heavy chain residue.

[0053] In some embodiments, an antibody heavy chain variable region is engineered. FIG. 5 is a germline alignment of human heavy chain variable domain V and J regions. In some embodiments, the heterodimeric antibody comprises a heavy chain variable region that is at least about 70%, at least about 71%, at least about 72%, at least about 73%, at least about 74%, at least about 75%, at least about 76%, at least about 77%, at least about 78%, at least about 79%, at least about 80%, at least about 81%, at least about 82%, at least about 83%, at least about 84%, at least about 85%, at least about 86%, at least about 87%, at least about 88%, at least about 89%, at least about 90%, at least about 91%, at least about 92%, at least about 93%, at least about 94%, at least about 95%, at least about 96%, at least about 97%, at least about 98%, or at least about 99% identical to a human germline heavy chain variable region.

[0054] V region interface residues (i.e., amino acid residues that mediate assembly of the VH and VL domains) within the VH domain include AHo positions 1 (Kabat position 1), 3 (Kabat position 3), 42 (Kabat position 35), 44 (Kabat position 37), 46 (Kabat position 39), 50 (Kabat position 43), 51 (Kabat position 44), 52 (Kabat position 45), 53 (Kabat position 46), 54 (Kabat position 47), 57 (Kabat position 50), 70 (Kabat position 59), 103 (Kabat position 89), 105 (Kabat position 91), and 107 (Kabat position 93). J region interface residues within the include AHo positions 139 (Kabat position 103), 140 (Kabat position 104), 141 (Kabat position 105), and 142 (Kabat position 106). In some embodiments, one or more interface residues are substituted with a charged (positive- or negative-charged) amino acid.

[0055] In some embodiments, the amino acid at AHo position 46 (Kabat position 39) of the VH domain is replaced with a positive-charged amino acid. In alternative embodiments, the amino acid at AHo position 46 (Kabat position 39) of the VH domain is replaced with a negative-charged amino acid.

[0056] In some embodiments, the amino acid at AHo position 51 (Kabat position 44) and/or AHo position 141 (Kabat position 105) of the VH domain are replaced with a charged amino acid. In some embodiments, the amino acid at AHo position 51 is substituted for a positive-charged amino acid, e.g., lysine. In alternative embodiments, the amino acid at AHo position 51 is substituted for a negative-charged amino acid, e.g., aspartic acid. In some embodiments, the amino acid at AHo position 141 is substituted for a positive-charged amino acid, e.g., lysine. In alternative embodiments, the amino acid at AHo position 141 is substituted for a negative-charged amino acid, e.g., aspartic acid. In some embodiments, the amino acid at AHo positions 51 and AHo position 141 are substituted for a positive-charged amino acid, e.g., lysine, or a negative charged amino acid, e.g., aspartic acid. Such embodiments may further comprise a substitution at AHo position 46 to a positive- or negative-charged amino acid.

[0057] The CH1 region of the heavy chain also complexes with the light chain, and this region can be engineered to increase the efficiency of a particular heavy chain pairing with its cognate light chain. Assembly may be facilitated by introducing a cysteine residue into the heavy and light chain at or near the interface to allow formation of di-sulfide bonds, altering amino acids to create a knobs-into-holes effect, and electros engineering similar to that described herein for the variable regions.

[0058] In some embodiments, the heterodimeric antibody comprises a heavy chain CH1 region that is at least about 70%, at least about 71%, at least about 72%, at least about 73%, at least about 74%, at least about 75%, at least about 76%, at least about 77%, at least about 78%, at least about 79%, at least about 80%, at least about 81%, at least about 82%, at least about 83%, at least about 84%, at least about 85%, at least about 86%, at least about 87%, at least about 88%, at least about 89%, at least about 90%, at least about 91%, at least about 92%, at least about 93%, at least about 94%, at least about 95%, at least about 96%, at least about 97%, at least about 98%, or at least about 99% identical to a human germline heavy chain CH1 region.

[0059] In some embodiments, one or more amino acids in the CH1 domain of the heterodimeric antibody at an EU position selected from the group consisting of F126, P127, L128, A141, L145, K147, D148, H168, F170, P171, V173, Q175, S176, S183, V185 and K213 is/are replaced with a charged amino acid. In this regard, a particularly preferred residue for substitution with a negative- or positive-charged amino acid is S183 (EU numbering system). In some embodiments, S183 is substituted with a positive-charged amino acid. In alternative embodiments, S183 is substituted with a negative-charged amino acid.

[0060] The heterodimeric antibody described herein optionally further comprises two CH3 domains, at least one of which contains one or more substitutions introducing a non-native charged amino acid into the domain. In some embodiments, each CH3 domain comprises one or more amino acid substitutions in the CH3 domain to disfavor homodimerization, and more preferably, favor heterodimerization with the corresponding CH3 domain. International Publication No. WO 2009/089004 (incorporated herein by reference in its entirety) describes compositions and methods for engineering the CH3 domain interface to decrease homodimerization and increase heterodimerization between two CH3-domain-containing molecules. In some embodiments, amino acids at one or more positions selected from the group consisting of 399, 356 and 357 (EU numbering system) of the CH3 domain are replaced with a negative-charged amino acid. In some embodiments, amino acids at one or more positions selected from the group consisting of 370, 392 and 409 (EU numbering system) are replaced with a positive-charged amino acid. In alternative embodiments, amino acids at one or more positions selected from the group consisting of 399, 356 and 357 (EU numbering system) of the CH3 domain are replaced with a positive-charged amino acid. In further embodiments, amino acids at one or more positions selected from the group 370, 392 and 409 (EU numbering system) are replaced with a negative-charged amino acid. In some embodiments, the heterodimeric antibody comprises a first heavy chain comprising positive-charged amino acid at positions 399 and 356 (e.g., D399K and E356K), and a second heavy chain comprising negative-charged amino acids at positions 392 and 409 (e.g., K392D and K409D).

[0061] In one aspect, a heterodimeric antibody described herein comprises (a) a first amino acid substitution at an AHo position selected from the group consisting of AHo positions 42-50 that introduces a charged amino acid at said position, (b) a second amino acid substitution at an EU position selected from the group consisting of EU positions 126-213 that introduces a charged amino acid at said position, (c) a third amino acid substitution at an EU position selected from the group consisting of EU positions 352-360 that introduces a charged amino acid at said position, and (d) a fourth amino acid substitution at an EU position selected from the group consisting of EU positions 395-403 that introduces a charged amino acid, wherein the charged amino acid of (a) has the same charge as the charged amino acid of (b), and wherein the charged amino acids of (c) and (d) have an opposite charge of the charged amino acids of (a) and (b). For example, in some embodiments, the charged amino acids of (a) and (b) have a positive-charge and the charged amino acids of (c) and (d) have a negative-charge. In alternative embodiments, the charged amino acids of (a) and (b) have a negative-charge and the charged amino acids of (c) and (d) have a positive-charge. In some embodiments, the first amino acid substitution is at position AHo 46, the second amino acid substitution is at EU position 183, the third amino acid substitution is at EU position 356 and the fourth amino acid substitution is at EU position 399.

[0062] In another aspect, a heterodimeric antibody described herein comprises a heavy chain comprising (a) a first amino acid substitution at an AHo position selected from the group consisting of AHo positions 42-50 that introduces a charged amino acid at said position, (b) a second amino acid substitution at an EU position selected from the group consisting of EU positions 126-213 that introduces a charged amino acid at said position, (c) a third amino acid substitution at an EU position selected from the group consisting of EU positions 388-397 that introduces a charged amino acid at said position, and (d) a fourth amino acid substitution at an EU position selected from the group consisting of EU positions 404-413 that introduces a charged amino acid, wherein the charged amino acid of (a) has the same charge as the charged amino acid of (b), and wherein the charged amino acids of (c) and (d) have an opposite charge of the charged amino acids of (a) and (b). For example, in some embodiments, the charged amino acids of (a) and (b) have a positive-charge and the charged amino acids of (c) and (d) have a negative-charge. In alternative embodiments, the charged amino acids of (a) and (b) have a negative-charge and the charged amino acids of (c) and (d) have a positive-charge. In some embodiments, the first amino acid substitution is at AHo position 46, the second amino acid substitution is at EU position 183, the third amino acid substitution is at EU position 392 and the fourth amino acid substitution is at EU position 409.

[0063] Also provided herein is a heterodimeric antibody comprising a first heavy chain and a second heavy chain and a first light chain and a second light chain, wherein the first heavy chain comprises amino acid substitutions at positions 46 (AHo, Kabat 39), 183 (EU), 356 (EU) and 399 (EU), wherein the second heavy chain comprises amino acid substitutions at positions 46 (AHo), 183 (EU), 392 (EU) and 409 (EU), and wherein the first and second light chains comprise an amino acid substitution at positions 46 (AHo, Kabat 38) and 176 (EU), wherein the amino acid substitutions introduce a charged amino acid at said positions. In some embodiments, the glutamine at position AHo 46 (Kabat 39) of the first heavy chain is replaced with glutamic acid, the glutamine at position AHo 46 (Kabat 39) of the second heavy chain is replaced with lysine, the glutamine at position AHo 46 (Kabat 38) of the first light chain is replaced with lysine, the glutamine at position AHo 46 (Kabat 38) of the second light chain is replaced with glutamic acid, the serine at position 183 (EU) of the first heavy chain is replaced with glutamic acid, the glutamic acid at position 356 (EU) of the first heavy chain is replaced with lysine, the glutamic acid at position 399 (EU) of the first heavy chain is replaced with lysine, the serine at position 183 (EU) of the second heavy chain is replaced with lysine, the lysine at position 392 (EU) of the second heavy chain is replaced with aspartic acid, and/or the lysine at position 409 (EU) of the second heavy chain is replaced with aspartic acid.

[0064] In another aspect, described herein is an antibody that binds to a region of sclerostin comprising amino acids 86-111 of SEQ ID NO: 1, wherein the antibody comprises a heavy chain having a CH3 domain comprising one or more amino acid substitutions, wherein the one or more substitutions introduce charged amino acids that are electrostatically unfavorable to homodimer formation and electrostatically favorable to heterodimer formation. In some embodiments, a negative charged amino acid in the CH3 domain (e.g., at EU position D399, E356 or E357) is substituted with a positive charged amino acid. In some embodiments, amino acids at EU positions D399, E356 and E357 are substituted with a positive charged amino acid (e.g., lysine). International Publication No. WO 2009/089004 (incorporated herein by reference in its entirety) describes compositions and methods for engineering the CH3 domain interface to decrease homodimerization and increase heterodimerization between two CH3-domain-containing molecules.

[0065] Light Chain Modifications

[0066] As discussed above, to maximize binding of a particular heavy chain to its cognate light chain, both the heavy and light chains preferably contain complimentary amino acid substitutions to electrostatically steer the chains to assemble. Thus, in various embodiments, a light chain comprises one or more amino acid substitutions that compliment a heavy chain substitution discussed above.

[0067] In some embodiments, the light chain is a kappa light chain. Figure. 6 is a germline alignment of human kappa light chain variable domain V and J regions. In some embodiments, the heterodimeric antibody comprises a kappa chain variable region that is at least about 70%, at least about 71%, at least about 72%, at least about 73%, at least about 74%, at least about 75%, at least about 76%, at least about 77%, at least about 78%, at least about 79%, at least about 80%, at least about 81%, at least about 82%, at least about 83%, at least about 84%, at least about 85%, at least about 86%, at least about 87%, at least about 88%, at least about 89%, at least about 90%, at least about 91%, at least about 92%, at least about 93%, at least about 94%, at least about 95%, at least about 96%, at least about 97%, at least about 98%, or at least about 99% identical to a human germline kappa chain variable region.

[0068] V region interface residues (i.e., amino acid residues that mediate assembly of the VH and VL domains) within the VL domain include AHo positions 40 (Kabat 32), 42 (Kabat 34), 43 (Kabat 35), 44 (Kabat 36), 46 (Kabat 38), 49 (Kabat 41), 50 (Kabat 42), 51 (Kabat 43), 52 (Kabat 44), 53 (Kabat 45), 54 (Kabat 46), 56 (Kabat 48), 57 (Kabat 49), 58 (Kabat 50), 67 (Kabat 51), 69 (Kabat 53), 70 (Kabat 54), 71 (Kabat 55), 72 (Kabat 56), 73 (Kabat 57), 74 (Kabat 58), 103 (Kabat 85), 105 (Kabat 87), 107 (Kabat 89), 108 (Kabat 90), and 109 (Kabat 91). J region residues include AHo positions 116, 117, and 118. In some embodiments, one or more interface residues in the VL domain are substituted with a charged amino acid, preferably that has an opposite charge to those introduces into the cognate heavy chain variable domain (i.e., the VH domain). In some embodiments, the amino acid at AHo position 46 (Kabat 38) of the VL domain is replaced with a positive-charged amino acid. In some embodiments, such as when the amino acid at AHo position 46 (Kabat 39) in the VH domain is substituted with a positive-charged amino acid), the amino acid at AHo position 46 (Kabat 38) of the VL domain is replaced with a negative-charged amino acid.

[0069] In some embodiments, the amino acid at AHo positions 51 (Kabat 43) and/or AHo position 141 (Kabat 100) are substituted for a positive- or negative-charged amino acid. Such embodiments may further include having the amino acid at AHo position 46 substituted for a positive- or negative-charged amino acid. In some embodiments, the amino acid at AHo position 51 is substituted for a positive-charged amino acid, e.g., lysine. In alternative embodiments, the amino acid at AHo position 51 is substituted for a negative-charged amino acid, e.g., aspartic acid. In some embodiments, the amino acid at AHo position 141 is substituted for a positive-charged amino acid, e.g., lysine. In alternative embodiments, the amino acid at AHo position 141 is substituted for a negative-charged amino acid, e.g., aspartic acid. In some embodiments, the amino acid at AHo position 51 and AHo position 141 are substituted for a positive-charged amino acid, e.g., lysine, or a negative-charged amino acid, e.g., aspartic acid. Such embodiments may further comprise a substitution at AHo position 46 (Kabat 38) to a positive- or negative-charged amino acid.

[0070] The constant region of the light chain (i.e., the CL domain) also complexes with the heavy chain, and this region can be engineered to increase the efficiency of a particular light chain pairing with its cognate heavy chain. Assembly may be facilitated by introducing a cysteine residue into the heavy and light chain at or near the interface to allow formation of di-sulfide bonds, altering amino acids to create a knobs-into-holes effect, and electrostatic engineering similar to that described herein for the variable regions.

[0071] In embodiments where the light chain, is a kappa light chain, one or more amino acids in the CL domain of the heterodimeric antibody at a position (EU and Kabat numbering in a kappa light chain) selected from the group consisting of F116, F118, S121, D122, E123, Q124, S131, V133, L135, N137, N138, Q160, S162, T164, S174 and S176 are replaced with a charged amino acid. In some embodiments, an exemplary residue for substitution with a negative- or positive-charged amino acid is the amino acid at position 176 (EU and Kabat numbering system) of the CL domain. In some embodiments, the amino acid at position 176 of the CL domain is replaced with a positive-charged amino acid. In alternative embodiments, the amino acid at position 176 of the CL domain is replaced with a negative-charged amino acid, e.g., aspartic acid.

[0072] In some embodiments, the light chain is a lambda light chain. In some embodiments, one or more amino acids in the CL domain of the heterodimeric antibody at a position (Kabat numbering in a lambda chain) selected from the group consisting of T116, F118, S121, E123, E124, K129, T131, V133, L135, S137, E160, T162, S165, Q167, A174, S176 and Y178 are replaced with a charged amino acid. In some embodiments, an exemplary residue for substitution with a negative- or positive-charged amino acid is the amino acid at position 176 (EU and Kabat numbering system) of the CL domain. In some embodiments, the amino acid at position 176 of the CL domain is replaced with a positive-charged amino acid. In alternative embodiments, the amino acid at position 176 of the CL domain is replaced with a negative-charged amino acid, e.g., aspartic acid.

[0073] FIG. 7 is a germline alignment of human lambda light chain variable domain V and J regions. In some embodiments, the antigen binding protein or antibody comprises a light chain variable region that is at least about 70%, at least about 71%, at least about 72%, at least about 73%, at least about 74%, at least about 75%, at least about 76%, at least about 77%, at least about 78%, at least about 79%, at least about 80%, at least about 81%, at least about 82%, at least about 83%, at least about 84%, at least about 85%, at least about 86%, at least about 87%, at least about 88%, at least about 89%, at least about 90%, at least about 91%, at least about 92%, at least about 93%, at least about 94%, at least about 95%, at least about 96%, at least about 97%, at least about 98%, or at least about 99% identical to a human germline lambda chain variable region.

[0074] V region interface residues of the human germline lambda chain variable region in the CL domain include AHo positions 40 (Kabat 32), 42 (Kabat 34), 43 (Kabat 35), 44 (Kabat 36), 46 (Kabat 38), 49 (Kabat 41), 50 (Kabat 42), 51 (Kabat 43), 52 (Kabat 44), 53 (Kabat 45), 54 (Kabat 46), 56 (Kabat 48), 57 (Kabat 49), 58 (Kabat 50), 67 (Kabat 51), 69 (Kabat 53), 70 (Kabat 54), 71 (Kabat 55), 72 (Kabat 56), 73 (Kabat 57), 74 (Kabat 58), 103 (Kabat 85), 105 (Kabat 87), 107 (Kabat 89), 108 (Kabat 90), and 109 (Kabat 91). J region residues include AHo positions 139 and 140. The substitution of one or more of the amino acids at these positions with a charged amino acid is contemplated. In preferred embodiments, the one or more amino acids is substituted with a positive- or negative-charged amino acid, which is an opposite charge to those introduce into the cognate heavy chain variable domain.

[0075] In some embodiments, the amino acid at AHo positions 51 (Kabat 43) and/or AHo position 141 (Kabat 100) of the lambda variable region are substituted for a positive- or negative-charged amino acid. Such embodiments may further include having the amino acid at AHo position 46 substituted for a positive- or negative-charged amino acid. In some embodiments, the amino acid at AHo position 51 is substituted for a positive-charged amino acid, e.g., lysine. In alternative embodiments, the amino acid at AHo position 51 is substituted for a negative-charged amino acid, e.g., aspartic acid. In some embodiments, the amino acid at AHo position 141 is substituted for a positive-charged amino acid, e.g., lysine. In alternative embodiments, the amino acid at AHo position 141 is substituted for a negative-charged amino acid, e.g., aspartic acid. In some embodiments, the amino acid at AHo position 51 and AHo position 141 are substituted for a positive-charged amino acid, e.g., lysine, or a negative-charged amino acid, e.g., aspartic acid. Such embodiments may further comprise a substitution at AHo position 46 to a positive- or negative-charged amino acid.

[0076] Optional Further Modifications

[0077] The heavy chains of the heterodimeric antibodies described herein may further comprise one of more mutations that affect binding of the antibody containing the heavy chains to one or more Fc receptors. One of the functions of the Fc portion of an antibody is to communicate to the immune system when the antibody binds its target. This is commonly referenced as “effector function.” Communication leads to antibody-dependent cellular cytotoxicity (ADCC), antibody-dependent cellular phagocytosis (ADCP), and/or complement dependent cytotoxicity (CDC). ADCC and ADCP are mediated through the binding of the Fc to Fc receptors on the surface of cells of the immune system. CDC is mediated through the binding of the Fc with proteins of the complement system, e.g., C1q.

[0078] The IgG subclasses vary in their ability to mediate effector functions. For example, IgG1 is superior to IgG2 and IgG4 at mediating ADCC and CDC. The effector function of an antibody can be increased, or decreased, by introducing one or more mutations into the Fc. Embodiments of the invention include heterodimeric antibodies, having an Fc engineered to increase effector function (U.S. Pat. No. 7,317,091 and Strohl, Curr. Opin. Biotech., 20:685-691, 2009; both incorporated herein by reference in its entirety). Exemplary IgG1 Fc molecules having increased effector function include those having one or more of the following substitutions [numbering based on the EU numbering scheme]:

### S239D/I332E

### S239D/A330S/I332E

### S239D/A330L/I332E

### S298A/D333A/K334A

### P247I/A339D

### P247I/A339Q

### D280H/K290S

### D280H/K290S/S298D

### D280H/K290S/S298V

### F243L/R292P/Y300L

### F243L/R292P/Y300L/P396L

### F243L/R292P/Y300L/V305I/P396L

### G236A/S239D/I332E

### K326A/E333A

### K326W/E333S

### K290E/S298G/T299A

### K290N/S298G/T299A

### K290E/S298G/T299A/K326E

### K290N/S298G/T299A/K326E

### K334V

### L235S+S239D+K334V

### Q311M+K334V

### S239D+K334V

### F243V+K334V

### E294L+K334V

### S298T+K334V

### E233L+Q311M+K334V

### L234I+Q311M+K334V

### S298T+K334V

### A330M+K334V

### A330F+K334V

### Q311M+A330M+K334V

### Q311M+A330F+K334V

### S298T+A330M+K334V

### S298T+A330F+K334V

### S239D+A330M+K334V

### S239D+S298T+K334V

### L234Y+K290Y+Y296W

### L234Y+F243V+Y296W

### L234Y+E294L+Y296W

### L234Y+Y296W

### K290Y+Y296W

[0079] Further embodiments of the invention include heterodimeric antibodies, having an Fc engineered to decrease effector function. Exemplary Fc molecules having decreased effector function include those having one or more of the following substitutions [numbering based on the EU numbering scheme]:

### N297A (IgG1)

### L234A/L235A (IgG1)

### V234A/G237A (IgG2)

### L235A/G237A/E318A (IgG4)

### H268Q/V309L/A330S/A331S (IgG2)

### C220S/C226S/C229S/P238S (IgG1)

### C226S/C229S/E233P/L234V/L235A (IgG1)

### L234F/L235E/P331S (IgG1)

### S267E/L328F (IgG1)

[0080] Another method of increasing effector function of IgG Fc-containing proteins is by reducing the fucosylation of the Fc. Removal of the core fucose from the biantennary complex-type oligosaccharides attached to the Fc greatly increased ADCC effector function without altering antigen binding or CDC effector function. Several methods are known for reducing or abolishing fucosylation of Fc-containing molecules, e.g., antibodies. These include recombinant expression in certain mammalian cell lines including a FUT8 knockout cell line, variant CHO line Lec13, rat hybridoma cell line YB2/0, a cell line comprising a small interfering RNA specifically against the FUT8 gene, and a cell line coexpressing β-1,4-N-acetylglucosaminyltransferase III and Golgi β-mannosidase II. Alternatively, the Fc-containing molecule may be expressed in a non-mammalian cell such as a plant cell, yeast, or prokaryotic cell, e.g., E. coli. Thus, in certain embodiments, a composition comprises an antibody having reduced fucosylation or lacking fucosylation altogether.

[0081] It is contemplated that essentially any antibody variable domain may be incorporated into the heterodimeric antibody format described herein. Exemplary antibody variable domains (and the antigen to which they specifically bind) include, but are not limited to, those described in U.S. Pat. No. 7,947,809 and U.S. Patent Application Publication No. 20090041784 (glucagon receptor), U.S. Pat. No. 7,939,070, U.S. Pat. No. 7,833,527, U.S. Pat. No. 7,767,206, and U.S. Pat. No. 7,786,284 (IL-17 receptor A), U.S. Pat. No. 7,872,106 and U.S. Pat. No. 7,592,429 (Sclerostin), U.S. Pat. No. 7,871,611, U.S. Pat. No. 7,815,907, U.S. Pat. No. 7,037,498, U.S. Pat. No. 7,700,742, and U.S. Patent Application Publication No. 20100255538 (IGF-1 receptor), U.S. Pat. No. 7,868,140 (B7RP1), U.S. Pat. No. 7,807,159 and U.S. Patent Application Publication No. 20110091455 (myostatin), U.S. Pat. No. 7,736,644, U.S. Pat. No. 7,628,986, U.S. Pat. No. 7,524,496, and U.S. Patent Application Publication No. 20100111979 (deletion mutants of epidermal growth factor receptor), U.S. Pat. No. 7,728,110 (SARS coronavirus), U.S. Pat. No. 7,718,776 and U.S. Patent Application Publication No. 20100209435 (OPGL), U.S. Pat. No. 7,658,924 and U.S. Pat. No. 7,521,053 (Angiopoietin-2), U.S. Pat. No. 7,601,818, U.S. Pat. No. 7,795,413, U.S. Patent Application Publication No. 20090155274, U.S. Patent Application Publication No. 20110040076 (NGF), U.S. Pat. No. 7,579,186 (TGF-β type II receptor), U.S. Pat. No. 7,541,438 (connective tissue growth factor), U.S. Pat. No. 7,438,910 (IL1-R1), U.S. Pat. No. 7,423,128 (properdin), U.S. Pat. No. 7,411,057, U.S. Pat. No. 7,824,679, U.S. Pat. No. 7,109,003, U.S. Pat. No. 6,682,736, U.S. Pat. No. 7,132,281, and U.S. Pat. No. 7,807,797 (CTLA-4), U.S. Pat. No. 7,084,257, U.S. Pat. No. 7,790,859, U.S. Pat. No. 7,335,743, U.S. Pat. No. 7,084,257, and U.S. Patent Application Publication No. 20110045537 (interferon-gamma), U.S. Pat. No. 7,932,372 (MAdCAM), U.S. Pat. No. 7,906,625, U.S. Patent Application Publication No. 20080292639, and U.S. Patent Application Publication No. 20110044986 (amyloid), U.S. Pat. No. 7,815,907 and U.S. Pat. No. 7,700,742 (insulin-like growth factor I), U.S. Pat. No. 7,566,772 and U.S. Pat. No. 7,964,193 (interleukin-1β), U.S. Pat. No. 7,563,442, U.S. Pat. No. 7,288,251, U.S. Pat. No. 7,338,660, U.S. Pat. No. 7,626,012, U.S. Pat. No. 7,618,633, and U.S. Patent Application Publication No. 20100098694 (CD40), U.S. Pat. No. 7,498,420 (c-Met), U.S. Pat. No. 7,326,414, U.S. Pat. No. 7,592,430, and U.S. Pat. No. 7,728,113 (M-CSF), U.S. Pat. No. 6,924,360, U.S. Pat. No. 7,067,131, and U.S. Pat. No. 7,090,844 (MUC18), U.S. Pat. No. 6,235,883, U.S. Pat. No. 7,807,798, and U.S. Patent Application Publication No. 20100305307 (epidermal growth factor receptor), U.S. Pat. No. 6,716,587, U.S. Pat. No. 7,872,113, U.S. Pat. No. 7,465,450, U.S. Pat. No. 7,186,809, U.S. Pat. No. 7,317,090, and U.S. Pat. No. 7,638,606 (interleukin-4 receptor), U.S. Patent Application Publication No. 20110135657 (BETA-KLOTHO), U.S. Pat. No. 7,887,799 and U.S. Pat. No. 7,879,323 (fibroblast growth factor-like polypeptides), U.S. Pat. No. 7,867,494 (IgE), U.S. Patent Application Publication No. 20100254975 (ALPHA-4 BETA-7), U.S. Patent Application Publication No. 20100197005 and U.S. Pat. No. 7,537,762 (ACTIVIN RECEPTOR-LIKE KINASE-1), U.S. Pat. No. 7,585,500 and U.S. Patent Application Publication No. 20100047253 (IL-13), U.S. Patent Application Publication No. 20090263383 and U.S. Pat. No. 7,449,555 (CD148), U.S. Patent Application Publication No. 20090234106 (ACTIVIN A), U.S. Patent Application Publication No. 20090226447 (angiopoietin-1 and angiopoietin-2), U.S. Patent Application Publication No. 20090191212 (Angiopoietin-2), U.S. Patent Application Publication No. 20090155164 (C-FMS), U.S. Pat. No. 7,537,762 (activin receptor-like kinase-1), U.S. Pat. No. 7,371,381 (galanin), U.S. Patent Application Publication No. 20070196376 (INSULIN-LIKE GROWTH FACTORS), U.S. Pat. No. 7,267,960 and U.S. Pat. No. 7,741,115 (LDCAM), US7265212 (CD45RB), U.S. Pat. No. 7,709,611, U.S. Patent Application Publication No. 20060127393 and U.S. Patent Application Publication No. 20100040619 (DKK1), U.S. Pat. No. 7,807,795, U.S. Patent Application Publication No. 20030103978 and U.S. Pat. No. 7,923,008 (osteoprotegerin), U.S. Patent Application Publication No. 20090208489 (0V064), U.S. Patent Application Publication No. 20080286284 (PSMA), U.S. Pat. No. 7,888,482, U.S. Patent Application Publication No. 20110165171, and U.S. Patent Application Publication No. 20110059063 (PAR2), U.S. Patent Application Publication No. 20110150888 (HEPCIDIN), U.S. Pat. No. 7,939,640 (B7L-1), U.S. Pat. No. 7,915,391 (c-Kit), U.S. Pat. No. 7,807,796, U.S. Pat. No. 7,193,058, and U.S. Pat. No. 7,427,669 (ULBP), U.S. Pat. No. 7,786,271, U.S. Pat. No. 7,304,144, and U.S. Patent Application Publication No. 20090238823 (TSLP), U.S. Pat. No. 7,767,793 (SIGIRR), U.S. Pat. No. 7,705,130 (HER-3), U.S. Pat. No. 7,704,501 (ataxin-1-like polypeptide), U.S. Pat. No. 7,695,948 and U.S. Pat. No. 7,199,224 (TNF-α converting enzyme), U.S. Patent Application Publication No. 20090234106 (ACTIVIN A), U.S. Patent Application Publication No. 20090214559 and U.S. Pat. No. 7,438,910 (IL1-R1), U.S. Pat. No. 7,579,186 (TGF-β type II receptor), U.S. Pat. No. 7,569,387 (TNF receptor-like molecules), U.S. Pat. No. 7,541,438, (connective tissue growth factor), U.S. Pat. No. 7,521,048 (TRAIL receptor-2), U.S. Pat. No. 6,319,499, U.S. Pat. No. 7,081,523, and U.S. Patent Application Publication No. 20080182976 (erythropoietin receptor), U.S. Patent Application Publication No. 20080166352 and U.S. Pat. No. 7,435,796 (B7RP1), U.S. Pat. No. 7,423,128 (properdin), U.S. Pat. No. 7,422,742 and U.S. Pat. No. 7,141,653 (interleukin-5), U.S. Pat. No. 6,740,522 and U.S. Pat. No. 7,411,050 (RANKL), U.S. Pat. No. 7,378,091 (carbonic anhydrase IX (CA IX) tumor antigen), U.S. Pat. No. 7,318,925 and U.S. Pat. No. 7,288,253 (parathyroid hormone), U.S. Pat. No. 7,285,269 (TNF), U.S. Pat. No. 6,692,740 and U.S. Pat. No. 7,270,817 (ACPL), U.S. Pat. No. 7,202,343 (monocyte chemo-attractant protein-1), U.S. Pat. No. 7,144,731 (SCF), U.S. Pat. No. 6,355,779 and U.S. Pat. No. 7,138,500 (4-1BB), U.S. Pat. No. 7,135,174 (PDGFD), U.S. Pat. No. 6,630,143 and U.S. Pat. No. 7,045,128 (Flt-3 ligand), U.S. Pat. No. 6,849,450 (metalloproteinase inhibitor), U.S. Pat. No. 6,596,852 (LERK-5), U.S. Pat. No. 6,232,447 (LERK-6), U.S. Pat. No. 6,500,429 (brain-derived neurotrophic factor), U.S. Pat. No. 6,184,359 (epithelium-derived T-cell factor), U.S. Pat. No. 6,143,874 (neurotrophic factor NNT-1), U.S. Patent Application Publication No. 20110027287 (PROPROTEIN CONVERTASE SUBTILISIN KEXIN TYPE 9 (PCSK9)), U.S. Patent Application Publication No. 20110014201 (IL-18 RECEPTOR), and U.S. Patent Application Publication No. 20090155164 (C-FMS). The above patents and published patent applications are incorporated herein by reference in their entirety for purposes of their disclosure of variable domain polypeptides, variable domain encoding nucleic acids, host cells, vectors, methods of making polypeptides encoding said variable domains, pharmaceutical compositions, and methods of treating diseases associated with the respective target of the variable domain-containing antigen binding protein or antibody.

[0082] Antibodies and Fragments Thereof

[0083] The heterodimeric antibodies described herein, in some embodiments, comprise anti-sclerostin and anti-DKK1 antibodies and fragments thereof as described herein (e.g., a heterodimeric antibody comprising a heavy and light chain that mediates binding to sclerostin and a heavy and light chain that mediates binding to DKK1). The term “antibody” refers to an intact antibody, or a binding fragment thereof. An antibody may comprise a complete antibody (immunoglobulin) molecule (including polyclonal, monoclonal, chimeric, humanized, and/or human versions having full length heavy and/or light chains), or comprise an antigen binding fragment thereof. Antibody fragments include F(ab′)₂, Fab, Fab′, Fv, Fc, and Fd fragments, and can be incorporated into single domain antibodies (e.g., nanobodies), single-chain antibodies, maxibodies, minibodies, intrabodies, diabodies, triabodies, tetrabodies, v-NAR and bis-scFv (see, e.g., Hollinger and Hudson, Nature Biotechnology, 23(9):1126-1136 (2005)). Antibody polypeptides, including fibronectin polypeptide monobodies, also are disclosed in U.S. Pat. No. 6,703,199. Other antibody polypeptides are disclosed in U.S. Patent Publication No. 20050238646.

[0084] An antibody fragment may be a synthetic or genetically engineered protein. For example, antibody fragments include isolated fragments consisting of the light chain variable region, “Fv” fragments consisting of the variable regions of the heavy and light chains, and recombinant single chain polypeptide molecules in which light and heavy variable regions are connected by a peptide linker (scFv proteins).

[0085] Another form of an antibody fragment is a peptide comprising one or more complementarity determining regions (CDRs) of an antibody. As used herein, the term “CDR” refers to the complementarity determining region within antibody variable sequences. There are three CDRs in each of the variable regions of the heavy chain and the light chain, which are designated CDR1, CDR2 and CDR3, for each of the variable regions. The term “CDR set” as used herein refers to a group of three CDRs that occur in a single variable region capable of binding the antigen. The exact boundaries of these CDRs have been defined differently according to different systems. The system described by Kabat (Kabat et al., Sequences of Proteins of Immunological Interest (National Institutes of Health, Bethesda, Md. (1987) and (1991)) not only provides an unambiguous residue numbering system applicable to any variable region of an antibody, but also provides precise residue boundaries defining the three CDRs. These CDRs may be referred to as Kabat CDRs. Chothia and coworkers (Chothia & Lesk, J. Mol. Biol. 196:901-917 (1987) and Chothia et al., Nature 342:877-883 (1989)) found that certain sub-portions within Kabat CDRs adopt nearly identical peptide backbone conformations, despite having great diversity at the level of amino acid sequence. These sub-portions were designated as L1, L2 and L3 or H1, H2 and H3 where the “L” and the “H” designates the light chain and the heavy chains regions, respectively. These regions may be referred to as Chothia CDRs, which have boundaries that overlap with Kabat CDRs. Other boundaries defining CDRs overlapping with the Kabat CDRs have been described by Padlan (FASEB J. 9:133-139 (1995)) and MacCallum (J Mol Biol 262(5):73245 (1996)). Still other CDR boundary definitions may not strictly follow one of the above systems, but will nonetheless overlap with the Kabat CDRs, although they may be shortened or lengthened in light of prediction or experimental findings that particular residues or groups of residues or even entire CDRs do not significantly impact antigen binding. The methods used herein may utilize CDRs defined according to any of these systems, although preferred embodiments use Kabat or Chothia defined CDRs.

[0086] CDRs (also termed “minimal recognition units” or “hypervariable region”) are obtained by, e.g., constructing polynucleotides that encode the CDR of interest. Such polynucleotides are prepared, for example, by using the polymerase chain reaction to synthesize the variable region using mRNA of antibody-producing cells as a template (see, for example, Larrick et al., Methods: A Companion to Methods in Enzymology, 2:106 (1991); Courtenay-Luck, “Genetic Manipulation of Monoclonal Antibodies,” in Monoclonal Antibodies Production, Engineering and Clinical Application, Ritter et al. (eds.), page 166, Cambridge University Press (1995); and Ward et al., “Genetic Manipulation and Expression of Antibodies,” in Monoclonal Antibodies: Principles and Applications, Birch et al., (eds.), page 137, Wiley-Liss, Inc. (1995)).

[0087] The methods and antibody chains described herein are useful for generating heterodimeric antibodies. “Specifically binds” as used herein means that the antigen binding protein preferentially binds the antigen over other proteins. In some embodiments “specifically binds” means the antigen binding protein has a higher affinity for the antigen than for other proteins. Antigen binding proteins that specifically bind an antigen may have a binding affinity for the antigen of less than or equal to 1×10⁻⁷ M, less than or equal to 2×10⁻⁷ M, less than or equal to 3×10⁻⁷ M, less than or equal to 4×10⁻⁷ M, less than or equal to 5×10⁻⁷ M, less than or equal to 6×10⁻⁷ M, less than or equal to 7×10⁻⁷ M, less than or equal to 8×10⁻⁷ M, less than or equal to 9×10⁻⁷ M, less than or equal to 1×10⁻⁸ M, less than or equal to 2×10⁻⁸ M, less than or equal to 3×10⁻⁸ M, less than or equal to 4×10⁻⁸ M, less than or equal to 5×10⁻⁸ M, less than or equal to 6×10⁻⁸ M, less than or equal to 7×10⁻⁸ M, less than or equal to 8×10⁻⁸ M, less than or equal to 9×10⁻⁸ M, less than or equal to 1×10⁻⁹ M, less than or equal to 2×10⁻⁹ M, less than or equal to 3×10⁻⁹ M, less than or equal to 4×10⁻⁹ M, less than or equal to 5×10⁻⁹ M, less than or equal to 6×10⁻⁹ M, less than or equal to 7×10⁻⁹ M, less than or equal to 8×10⁻⁹ M, less than or equal to 9×10⁻⁹ M, less than or equal to 1×10⁻¹⁰ M, less than or equal to 2×10⁻¹⁰ M, less than or equal to 3×10⁻¹⁰ M, less than or equal to 4×10⁻¹⁰ M, less than or equal to 5×10⁻¹⁰ M, less than or equal to 6×10⁻¹⁰ M, less than or M, equal to 7×10⁻¹⁰ M less than or equal to 8×10⁻¹⁰ M, less than or equal to 9×10⁻¹⁰ M, less than or equal to 1×10⁻¹¹ M, less than or equal to 2×10⁻¹¹ M, less than or equal to 3×10⁻¹¹ M, less than or equal to 4×10⁻¹¹ M, less than or equal to 5×10⁻¹¹M, less than or equal to 6×10⁻¹¹ M, less than or equal to 7×10⁻¹¹ M, less than or equal to 8×10⁻¹¹ M, less than or equal to 9×10⁻¹¹ M, less than or equal to 1×10⁻¹² M, less than or equal to 2×10⁻¹² M, less than or equal to 3×10⁻¹² M, less than or equal to 4×10⁻¹² M, less than or equal to 5×10⁻¹² M, less than or equal to 6×10⁻¹² M, less than or equal to 7×10⁻¹² M, less than or equal to 8×10⁻¹² M, or less than or equal to 9×10⁻¹² M.

[0088] Anti-Sclerostin Antibodies

[0089] In some embodiments, the heterodimeric antibody described herein comprises a sclerostin binding portion comprising an anti-sclerostin antibody. An “anti-sclerostin antibody” binds to sclerostin or portions thereof to block or impair binding of human sclerostin to one or more ligands. Sclerostin, the product of the SOST gene, is absent in sclerosteosis, a skeletal disease characterized by bone overgrowth and strong dense bones (Brunkow et al., Am. J. Hum. Genet., 68:577-589 (2001); Balemans et al., Hum. Mol. Genet., 10:537-543 (2001)). The amino acid sequence of human sclerostin is reported by Brunkow et al. and is disclosed in U.S. Patent Publication No. 20070110747 as SEQ ID NO: 1 (which patent publication is incorporated in its entirety for its description of sclerostin binding agents and Sequence Listing). Recombinant human sclerostin/SOST is commercially available from R&D Systems (Minneapolis, Minn., USA; 2006 Catalog #1406-ST-025). Additionally, recombinant mouse sclerostin/SOST is commercially available from R&D Systems (Minneapolis, Minn., USA; 2006 Catalog #1589-ST-025). Research grade sclerostin-binding monoclonal antibodies are commercially available from R&D Systems (Minneapolis, Minn., USA; mouse monoclonal: 2006 Catalog #MAB1406; rat monoclonal: 2006 Catalog #MAB1589). U.S. Pat. Nos. 6,395,511 and 6,803,453, and U.S. Patent Publication Nos. 2004/0009535 and 2005/0106683 refer to anti-sclerostin antibodies generally. Examples of sclerostin binding agents suitable for use in the context of the invention also are described in U.S. Patent Publication Nos. 2007/0110747 and 2007/0072797, which are hereby incorporated by reference. Additional information regarding materials and methods for generating sclerostin binding agents can be found in U.S. Patent Publication No. 20040158045 (hereby incorporated by reference).

[0090] Anti-sclerostin antibodies or fragments thereof may bind to sclerostin of SEQ ID NO: 1, or a naturally occurring variant thereof, with an affinity (Kd) of less than or equal to 1×10⁻⁷ M, less than or equal to 1×10⁻⁸M, less than or equal to 1×10⁻⁹ M, less than or equal to 1×10⁻¹⁰ M, less than or equal to 1×10⁻¹¹ M, or less than or equal to 1×10⁻¹² M. Affinity is determined using a variety of techniques, an example of which is an affinity ELISA assay. In various embodiments, affinity is determined by a BIAcore assay. In various embodiments, affinity is determined by a kinetic method. In various embodiments, affinity is determined by an equilibrium/solution method. U.S. Patent Publication No. 2007/0110747 contains additional description of affinity assays suitable for determining the affinity (Kd) of an antibody for sclerostin.

[0091] In some or any embodiments, the anti-sclerostin antibody or antibody fragment binds to a sclerostin polypeptide comprising the amino acid sequence set forth in SEQ ID NO: 1 and binds a region of sclerostin comprising the sequence of SEQ ID NO: 6 (CGPARLLPNAIGRGKWWRPSGPDFRC; corresponding to amino acids 86-111 of SEQ ID NO: 1). This region is also referred to herein as the “loop 2” region of sclerostin. Regions of sclerostin outside of the loop 2 region are defined herein as “non-loop 2 regions.” Alternatively or in addition, the anti-sclerostin antibody binds to a sclerostin polypeptide comprising amino acids 57-146 of SEQ ID NO: 1. Alternatively or in addition, the anti-sclerostin antibody binds to a sclerostin polypeptide comprising amino acids 89-103 of SEQ ID NO: 1 and/or amino acids 137-151 of SEQ ID NO: 1. Alternatively or in addition, the anti-sclerostin antibody binds to a sclerostin polypeptide comprising the amino acid sequence set forth in SEQ ID NO: 1 and binds the sequence of at least one of SEQ ID NO: 2 (DVSEYSCRELHFTR; corresponding to amino acids 51-64 of SEQ ID NO: 1), SEQ ID NO: 3 (SAKPVTELVCSGQCGPAR; corresponding to amino acids 73-90 of SEQ ID NO: 1), SEQ ID NO: 4 (WWRPSGPDFRCIPDRYR; corresponding to amino acids 101-117 of SEQ ID NO: 1), SEQ ID NO: 5 (LVASCKCKRLTR; corresponding to amino acids 138-149 of SEQ ID NO: 1), SEQ ID NO: 70 (SAKPVTELVCSGQC; corresponding to amino acids 73-86 of SEQ ID NO: 1), SEQ ID NO: 71 (LVASCKC; corresponding to amino acids 138-144 of SEQ ID NO: 1), SEQ ID NO: 72 (C1RELHFTR; corresponding to amino acids 57-64 of SEQ ID NO: 1), or SEQ ID NO: 73 (CIPDRYR; corresponding to amino acids 111-117 of SEQ ID NO: 1) within SEQ ID NO: 1. For example, in one aspect, the anti-sclerostin antibody binds a subregion of sclerostin of SEQ ID NO: 1 comprising SEQ ID NOs: 2-5 (and/or SEQ ID NOs: 70-73), optionally in its native three-dimensional conformation. Optionally, the anti-sclerostin antibody binds a peptide consisting of one or more of SEQ ID NO: 2, SEQ ID NO: 3, SEQ ID NO: 4, SEQ ID NO: 5, SEQ ID NO: 6, SEQ ID NO: 70, SEQ ID NO: 71, SEQ ID NO: 72, or SEQ ID NO: 73 (e.g., a peptide consisting of SEQ ID NO: 2, SEQ ID NO: 3, SEQ ID NO: 4, and SEQ ID NO: 5 or a peptide consisting of SEQ ID NO: 70, SEQ ID NO: 71, SEQ ID NO: 72, and SEQ ID NO: 73).

[0092] In some or any embodiments, the anti-sclerostin antibody binds to a sclerostin polypeptide comprising amino acids 89-103 and 137-151 of SEQ ID NO: 1.

[0093] In some or any embodiments, the anti-sclerostin antibody binds to a sclerostin polypeptide having the amino acid sequences of SEQ ID NO:2, SEQ ID NO:3, SEQ ID NO:4 and SEQ ID NO:5, wherein SEQ ID NO:2 and 4 are joined by a disulfide bond at amino acid positions 57 and 111 with reference to SEQ ID NO:1, and SEQ ID NO:3 and 5 are joined by at least one of (a) a disulfide bond at amino acid positions 82 and 142 with reference to SEQ ID NO:1, and (b) a disulfide bond at amino acid positions 86 and 144 with reference to SEQ ID NO:1; the polypeptide may retain the tertiary structure of the corresponding polypeptide region of human sclerostin of SEQ ID NO:1. Alternatively or in addition, the anti-sclerostin antibody binds a polypeptide having the amino acid sequences of SEQ ID NO: 70, SEQ ID NO: 71, SEQ ID NO: 72 and SEQ ID NO: 73, wherein SEQ ID NO: 72 and 73 are joined by a disulfide bond at amino acid positions 57 and 111 with reference to SEQ ID NO: 1, and SEQ ID NO: 70 and 71 are joined by at least one of (a) a disulfide bond at amino acid positions 82 and 142 with reference to SEQ ID NO: 1, and (b) a disulfide bond at amino acid positions 86 and 144 with reference to SEQ ID NO: 1.

[0094] Optionally, the anti-sclerostin antibody binds a peptide consisting essentially of the amino acid sequences of SEQ ID NO: 2, SEQ ID NO: 3, SEQ ID NO: 4 and SEQ ID NO: 5, wherein SEQ ID NO: 2 and 4 are joined by a disulfide bond at amino acid positions 57 and 111 with reference to SEQ ID NO: 1, and SEQ ID NO: 3 and 5 are joined by at least one of (a) a disulfide bond at amino acid positions 82 and 142 with reference to SEQ ID NO: 1, and (b) a disulfide bond at amino acid positions 86 and 144 with reference to SEQ ID NO: 1.

[0095] Optionally, the anti-sclerostin antibody binds to a polypeptide consisting essentially of a multiply truncated human sclerostin protein of SEQ ID NO: 1, wherein (a) amino acids 1-50, 65-72, 91-100, 118-137, and 150-190 of SEQ ID NO: 1 are absent from said polypeptide or (b) amino acids 1-56, 65-72, 87-110, 118-137, and 145-190 of SEQ ID NO: 1 are absent from said polypeptide.

[0096] In some or any embodiments, the anti-sclerostin antibody binds to a polypeptide having the amino acid sequences of SEQ ID NO: 70, SEQ ID NO: 71, SEQ ID NO: 72 and SEQ ID NO: 73, wherein SEQ ID NO: 72 and 73 are joined by a disulfide bond at amino acid positions 57 and 111 with reference to SEQ ID NO: 1, and SEQ ID NO: 70 and 71 are joined by at least one of (a) a disulfide bond at amino acid positions 82 and 142 with reference to SEQ ID NO: 1, and (b) a disulfide bond at amino acid positions 86 and 144 with reference to SEQ ID NO: 1.

[0097] In some or any embodiments, the sclerostin polypeptide retains the tertiary structure of the corresponding polypeptide region of human sclerostin of SEQ ID NO: 1.

[0098] In some or any embodiments, the anti-sclerostin antibody binds to (i) a portion of human sclerostin comprising amino acids 51-64, 73-90, 101-117, and 138-149 of SEQ ID NO: 1, wherein said portion has at least one, at least two or all three of: (a) a disulfide bond between amino acids 57 and 111; (b) a disulfide bond between amino acids 82 and 142; and (c) a disulfide bond between amino acids 86 and 144; or (ii) a portion of human sclerostin comprising amino acids 57-64, 73-86, 111-117, and 138-144 of SEQ ID NO: 1, wherein said portion has at least one, at least two, or all three of: (a) a disulfide bond between amino acids 57 and 111; (b) a disulfide bond between amino acids 82 and 142; and (c) a disulfide bond between amino acids 86 and 144.

[0099] In some or any embodiments, the anti-sclerostin antibody also binds to an epitope of SEQ ID NO: 6.

[0100] Anti-sclerostin antibodies for use in generating the heterodimeric antibodies described herein preferably modulate sclerostin function in the cell-based assay described in U.S. Patent Publication No. 2007/0110747 and/or the in vivo assay described in U.S. Patent Publication No. 20070110747 and/or bind to one or more of the epitopes described in U.S. Patent Publication No. 2007/0110747 and/or cross-block the binding of one of the antibodies described in U.S. Patent Publication No. 2007/0110747 and/or are cross-blocked from binding sclerostin by one of the antibodies described in U.S. Patent Publication No. 2007/0110747 (incorporated by reference in its entirety and for its description of assays for characterizing an anti-sclerostin antibody).

[0101] In various aspects, the anti-sclerostin antibody is also capable of neutralizing human sclerostin in a MC3T3 cell-based mineralization assay when there is less than a 6-fold excess of moles of sclerostin binding sites per well as compared to the number of moles of sclerostin per well. Mineralization by osteoblast-lineage cells in culture, either primary cells or cell lines, is used as an in vitro model of bone formation. An exemplary cell-based mineralization assay is described in U.S. Patent Publication No. 20070110747 at, e.g., Example 8 (hereby incorporated by reference). MC3T3-E1 cells (Sudo et al., J. Cell Biol., 96:191-198 (1983)) and subclones of the original cell line can form mineral in culture upon growth in the presence of differentiating agents. Such subclones include MC3T3-E1-BF (Smith et al., J. Biol. Chem., 275:19992-20001 (2000)). For both the MC3T3-E1-BF subclone as well as the original MC3T3-E1 cells, sclerostin can inhibit one or more of the sequence of events leading up to and including mineral deposition (i.e., sclerostin inhibits mineralization). Anti-sclerostin antibodies that are able to neutralize sclerostin's inhibitory activity allow for mineralization of the culture in the presence of sclerostin such that there is a statistically significant increase in, e.g., deposition of calcium phosphate (measured as calcium) as compared to the amount of calcium measured in the sclerostin-only (i.e., no antibody) treatment group.

[0102] When running the assay with the goal of determining whether a particular anti-sclerostin antibody (or other sclerostin inhibitor) can neutralize sclerostin, the amount of sclerostin used in the assay desirably is the minimum amount of sclerostin that causes at least a 70%, statistically significant, reduction in deposition of calcium phosphate (measured as calcium) in the sclerostin-only group, as compared to the amount of calcium measured in the no sclerostin group. An anti-sclerostin neutralizing antibody is defined as one that causes a statistically significant increase in deposition of calcium phosphate (measured as calcium) as compared to the amount of calcium measured in the sclerostin-only (i.e., no antibody) treatment group. To determine whether an anti-sclerostin antibody is neutralizing or not, the amount of anti-sclerostin antibody used in the assay needs to be such that there is an excess of moles of sclerostin binding sites per well as compared to the number of moles of sclerostin per well. Depending on the potency of the antibody, the fold excess that may be required can be 24, 18, 12, 6, 3, or 1.5, and one of skill is familiar with the routine practice of testing more than one concentration of binding agent (antibody). For example, a very potent anti-sclerostin neutralizing antibody will neutralize sclerostin when there is less than a 6-fold excess of moles of sclerostin binding sites per well as compared to the number of moles of sclerostin per well. A less potent anti-sclerostin neutralizing antibody will neutralize sclerostin only at a 12, 18 or 24 fold excess.

[0103] The anti-sclerostin antibody optionally has an IC50 of 100 nM or less, or 75 nM or less, or 50 nM or less, or 25 nM or less for neutralizing human sclerostin in a cell-based assay, such as a bone specific alkaline phosphatase assay, e.g., the bone specific alkaline phosphatase assay described in International Patent Publication No. WO 2008/115732 and U.S. Pat. No. 7,744,874 (incorporated herein by reference in its entirety for its description of cell-based assays and anti-sclerostin antibodies). The bone specific alkaline phosphatase assay is predicated on the ability of sclerostin to decrease BMP-4 and Wnt3a-stimulated alkaline phosphatase levels in the multipotential murine cell line, C2C12. According to WO 2008/115732, a neutralizing anti-sclerostin antibody mediates a dose-dependent increase of alkaline phosphatase activity in this assay.

[0104] Alternatively or in addition, the anti-sclerostin antibody has an IC50 of 100 nM or less (e.g., 75 nM or less, or 50 nM or less) for neutralizing human sclerostin in a cell-based Wnt signaling assay in HEK293 cell lines, such as the Wnt assay involving Wnt1-mediated induction of STF reporter gene described in e.g., International Patent Publication No. WO 2009/047356 (incorporated by reference for its discussion of anti-sclerostin antibodies and cell-based assays). Alternatively or in addition, the anti-sclerostin antibody has an IC50 of 500 nM or less (e.g., 250 nM or less, 150 nM or less, 100 nM or less, or 50 nM or less) for neutralizing human sclerostin in a BMP2-induced mineralization assay in MC3T3 cells, such as the mineralization assay described in e.g., International Patent Publication No. WO 2009/047356.

[0105] Examples of anti-sclerostin antibodies suitable for use in the context of the invention are described in U.S. Patent Publication Nos. 2007/0110747 and 2007/0072797, which are hereby incorporated by reference. In some embodiments, the anti-sclerostin antibody cross-blocks the binding of at least one of antibodies Ab-A, Ab-B, Ab-C, Ab-D, Ab-1, Ab-2, Ab-3, Ab-4, Ab-5, Ab-6, Ab-7, Ab-8, Ab-9, Ab-10, Ab-11, Ab-12, Ab-13, Ab-14, Ab-15, Ab-16, Ab-17, Ab-18, Ab-19, Ab-20, Ab-21, Ab-22, Ab-23, and Ab-24 (all of which are described in U.S. Patent Publication No. 20070110747) to sclerostin. Alternatively or in addition, the anti-sclerostin antibody is cross-blocked from binding to sclerostin by at least one of antibodies Ab-A, Ab-B, Ab-C, Ab-D, Ab-1, Ab-2, Ab-3, Ab-4, Ab-5, Ab-6, Ab-7, Ab-8, Ab-9, Ab-10, Ab-11, Ab-12, Ab-13, Ab-14, Ab-15, Ab-16, Ab-17, Ab-18, Ab-19, Ab-20, Ab-21, Ab-22, Ab-23, and Ab-24 (all of which are described in U.S. Patent Publication No. 20070110747). The terms “cross-block,” “cross-blocked,” and “cross-blocking” are used interchangeably herein to mean the ability of an antibody to interfere with the binding of other antibodies to sclerostin. The extent to which an antibody is able to interfere with the binding of another to sclerostin, and therefore whether it can be said to cross-block, can be determined using competition binding assays. In some aspects of the invention, a cross-blocking antibody or fragment thereof reduces sclerostin binding of a reference antibody between about 40% and about 100%, such as about 60% and about 100%, specifically between 70% and 100%, and more specifically between 80% and 100%. A particularly suitable quantitative assay for detecting cross-blocking uses a Biacore machine which measures the extent of interactions using surface plasmon resonance technology. Another suitable quantitative cross-blocking assay uses an ELISA-based approach to measure competition between antibodies in terms of their binding to sclerostin.

[0106] In some embodiments, the anti-sclerostin antibody cross-blocks the binding of an immunoglobulin comprising full length heavy and light chains to sclerostin of SEQ ID NO: 1 and/or is cross-blocked from binding to sclerostin of SEQ ID NO: 1 by an immunoglobulin comprising full length heavy and light chains, wherein the immunoglobulin comprising full length heavy and light chains comprise CDR sequences disclosed herein, such as one of the following three sets of CDR sequences: a) CDR-L1 of SEQ ID NO: 284, CDR-L2 of SEQ ID NO: 285, CDR-L3 of SEQ ID NO: 286, CDR-H1 of SEQ ID NO: 296, CDR-H2 of SEQ ID NO: 297, and CDR-H3 of SEQ ID NO: 298; b) CDR-L1 of SEQ ID NO: 48, CDR-L2 of SEQ ID NO: 49, CDR-L3 of SEQ ID NO: 50, CDR-H1 of SEQ ID NO: 45, CDR-H2 of SEQ ID NO: 46, and CDR-H3 of SEQ ID NO: 47; or c) CDR-L1 of SEQ ID NO: 42, CDR-L2 of SEQ ID NO: 43, CDR-L3 of SEQ ID NO: 44, CDR-H1 of SEQ ID NO: 39, CDR-H2 of SEQ ID NO: 40, and CDR-H3 of SEQ ID NO: 41. Alternatively, or in addition, the anti-sclerostin antibody cross-blocks the binding of immunoglobulin comprising full length heavy and light chains to sclerostin of SEQ ID NO: 1 and/or is cross-blocked from binding to sclerostin of SEQ ID NO: 1 by an immunoglobulin comprising full length heavy and light chains, wherein the immunoglobulin comprising full length heavy and light chains comprise the following CDRs: CDR-H1 of SEQ ID NO: 245, CDR-H2 of SEQ ID NO: 246, CDR-H3 of SEQ ID NO: 247, CDR-L1 of SEQ ID NO: 78, CDR-L2 of SEQ ID NO: 79 and CDR-L3 of SEQ ID NO: 80.

[0107] Alternatively, or in addition, the anti-sclerostin antibody cross-blocks the binding of immunoglobulin comprising full length heavy and light chains to sclerostin of SEQ ID NO: 1 and/or is cross-blocked from binding to sclerostin of SEQ ID NO: 1 by an immunoglobulin comprising full length heavy and light chains, wherein the immunoglobulin comprising full length heavy and light chains comprise the following CDRs: CDR-H1 of SEQ ID NO: 269, CDR-H2 of SEQ ID NO: 270, CDR-H3 of SEQ ID NO: 271, CDR-L1 of SEQ ID NO: 239, CDR-L2 of SEQ ID NO: 240 and CDR-L3 of SEQ ID NO: 241.

[0108] Examples of suitable anti-sclerostin antibodies and fragments thereof include antibodies and antibody fragments having one or more of CDR-H1, CDR-H2, CDR-H3, CDR-L1, CDR-L2 and CDR-L3 specifically disclosed herein and disclosed in U.S. Patent Publication No. 2007/0110747. At least one of the regions of CDR-H1, CDR-H2, CDR-H3, CDR-L1, CDR-L2, and CDR-L3 may have at least one amino acid substitution, provided that the antibody retains the binding specificity of the non-substituted CDR. Exemplary the anti-sclerostin antibodies include, but are not limited to, Ab-A, Ab-B, Ab-C, Ab-D, Ab-1, Ab-2, Ab-3, Ab-4, Ab-5, Ab-6, Ab-7, Ab-8, Ab-9, Ab-10, Ab-11, Ab-12, Ab-13, Ab-14, Ab-15, Ab-16, Ab-17, Ab-18, Ab-19, Ab-20, Ab-21, Ab-22, Ab-23, and Ab-24 of U.S. Patent Publication No. 2007/0110747. Other exemplary anti-sclerostin antibodies include, but are not limited to, 27H6, 19D11 and 20C3.

[0109] In addition, the anti-sclerostin antibody can comprise at least one CDR sequence having at least 75% identity (e.g., 100% identity) to a CDR selected from SEQ ID NOs: 39, 40, 41, 42, 43, 44, 45, 46, 47, 48, 49, 50, 51, 52, 53, 54, 55, 56, 57, 58, 59, 60, 61, 62, 78, 79, 80, 81, 99, 100, 101, 102, 103, 104, 105, 106, 107, 108, 109, 110, 111, 112, 113, 114, 115, 116, 237, 238, 239, 240, 241, 242, 243, 244, 245, 246, 247, 248, 249, 250, 251, 252, 253, 254, 255, 256, 257, 258, 259, 260, 261, 262, 263, 264, 265, 266, 267, 268, 269, 270, 271, 272, 273, 274, 275, 276, 277, 278, 279, 280, 281, 282, 283, 284, 285, 286, 287, 288, 289, 290, 291, 292, 293, 294, 295, 296, 297, 298, 351, 352, 353, 358, 359, and 360 provided in the Sequence Listing and disclosed in U.S. Patent Publication No. 20070110747. In addition, the anti-sclerostin antibody can comprise at least one CDR sequence having at least 75% identity (e.g., 100% identity) to a CDR selected from SEQ ID NOs: 417-422, 425-430 and 433-438 provided in the Sequence Listing. Preferably, the anti-sclerostin antibody comprises at least one CDR sequence having at least 75% identity to a CDR selected from SEQ ID NOs: 245, 246, 247, 78, 79, 80, 269, 270, 271, 239, 240, and 241, all of which is provided in the Sequence Listing and described in U.S. Patent Publication No. 20070110747. As described in U.S. Patent Publication No. 2007/0110747, the anti-sclerostin antibody can comprise: a) CDR sequences of SEQ ID NOs:54, 55, and 56 and CDR sequences of SEQ ID NOs:51, 52, and 53; b) CDR sequences of SEQ ID NOs:60, 61, and 62 and CDR sequences of SEQ ID NOs:57, 58, and 59; c) CDR sequences of SEQ ID NOs:48, 49, and 50 and CDR sequences of SEQ ID NOs:45, 46, and 47; d) CDR sequences of SEQ ID NOs:42, 43, and 44 and CDR sequences of SEQ ID NOs:39, 40, and 41; e) CDR sequences of SEQ ID NOs:275, 276, and 277 and CDR sequences of SEQ ID NOs:287, 288, and 289; f) CDR sequences of SEQ ID NOs:278, 279, and 280 and CDR sequences of SEQ ID NOs:290, 291, and 292; g) CDR sequences of SEQ ID NOs:78, 79, and 80 and CDR sequences of SEQ ID NOs: 245, 246, and 247; h) CDR sequences of SEQ ID NOs:81, 99, and 100 and CDR sequences of SEQ ID NOs:248, 249, and 250; i) CDR sequences of SEQ ID NOs:101, 102, and 103 and CDR sequences of SEQ ID NOs:251, 252, and 253; j) CDR sequences of SEQ ID NOs:104, 105, and 106 and CDR sequences of SEQ ID NOs:254, 255, and 256; k) CDR sequences of SEQ ID NOs:107, 108, and 109 and CDR sequences of SEQ ID NOs:257, 258, and 259; l) CDR sequences of SEQ ID NOs:110, 111, and 112 and CDR sequences of SEQ ID NOs:260, 261, and 262; m) CDR sequences of SEQ ID NOs:281, 282, and 283 and CDR sequences of SEQ ID NOs:293, 294, and 295; n) CDR sequences of SEQ ID NOs:113, 114, and 115 and CDR sequences of SEQ ID NOs:263, 264, and 265; o) CDR sequences of SEQ ID NOs:284, 285, and 286 and CDR sequences of SEQ ID NOs:296, 297, and 298; p) CDR sequences of SEQ ID NOs:116, 237, and 238 and CDR sequences of SEQ ID NOs:266, 267, and 268; q) CDR sequences of SEQ ID NOs:239, 240, and 241 and CDR sequences of SEQ ID NOs:269, 270, and 271) CDR sequences of SEQ ID NOs:242, 243, and 244 and CDR sequences of SEQ ID NOs:272, 273, and 274; or s) CDR sequences of SEQ ID NOs:351, 352, and 353 and CDR sequences of SEQ ID NOs:358, 359, and 360.

[0110] The anti-sclerostin antibody can comprise at least one CDR sequence having at least 75% identity (e.g., 100% identical) to a CDR selected from CDR-H1, CDR-H2, CDR-H3, CDR-L1, CDR-L2, and CDR-L3 wherein CDR-H1 has the sequence given in SEQ ID NO: 245, CDR-H2 has the sequence given in SEQ ID NO: 246, CDR-H3 has the sequence given in SEQ ID NO: 247, CDR-L1 has the sequence given in SEQ ID NO: 78, CDR-L2 has the sequence given in SEQ ID NO: 79 and CDR-L3 has the sequence given in SEQ ID NO: 80, all of which is provided in the Sequence Listing and described in U.S. Patent Publication No. 20070110747. The anti-sclerostin antibody, in various aspects, comprises two of the CDRs or six of the CDRs. Optionally, the anti-sclerostin antibody comprises all or part of a heavy chain (e.g., two heavy chains) comprising SEQ ID NO: 378 and all or part of a light chain (e.g., two light chains) comprising SEQ ID NO 376.

[0111] The anti-sclerostin antibody can comprise at least one CDR sequence having at least 75% identity (e.g., 100% identical) to a CDR selected from CDR-H1, CDR-H2, CDR-H3, CDR-L1, CDR-L2, and CDR-L3 wherein CDR-H1 has the sequence given in SEQ ID NO: 269, CDR-H2 has the sequence given in SEQ ID NO: 270, CDR-H3 has the sequence given in SEQ ID NO: 271, CDR-L1 has the sequence given in SEQ ID NO: 239, CDR-L2 has the sequence given in SEQ ID NO: 240 and CDR-L3 has the sequence given in SEQ ID NO 241, all of which is provided in the Sequence Listing and described in U.S. Patent Publication No. 20070110747. The anti-sclerostin antibody, in various aspects, comprises at least two of the CDRs or six of the CDRs. Optionally, the anti-sclerostin antibody comprises all or part of a heavy chain (e.g., two heavy chains) comprising SEQ ID NO: 366 and all or part of a light chain (e.g., two light chains) comprising SEQ ID NO 364.

[0112] Alternatively, the anti-sclerostin antibody can have a heavy chain comprising CDR's H1, H2, and H3 and comprising a polypeptide having the sequence provided in SEQ ID NO: 137, 145, or 392 or a variant thereof in which the CDRs are at least 75% identical (e.g., 100% identical) to SEQ ID NO: 245, 246, and 247, respectively, and a light chain comprising CDR's L1, L2 and L3 and comprising a polypeptide having the sequence provided in SEQ ID NO: 133 or 141 or a variant thereof in which the CDRs are at least 75% identical (e.g., 100% identical) to SEQ ID NO: 78, 79, and 80, respectively (as described in U.S. Patent Publication No. 2007/0110747).

[0113] The anti-sclerostin antibody may have a heavy chain comprising CDR's H1, H2, and H3 and comprising a polypeptide having the sequence provided in SEQ ID NO: 335, 331, 345, or 396 or a variant of any of the foregoing in which the CDRs are at least 75% (e.g., 100% identical) identical to SEQ ID NO: 269, 270, and 271, respectively, and a light chain comprising CDR's L1, L2, and L3 and comprising a polypeptide having the sequence provided in SEQ ID NO: 334 or 341 or a variant of any of the foregoing in which the CDRs are at least 75% identical (e.g., 100% identical) to SEQ ID NO: 239, 240, and 241, respectively (as described in U.S. Patent Publication No. 20070110747). All combinations of the heavy and light chain sequences are contemplated (e.g., heavy chains comprising SEQ ID NO: 335 and light chains comprising SEQ ID NO: 334; heavy chains comprising SEQ ID NO: 331 and light chains comprising SEQ ID NO: 334 or 341; and heavy chains comprising SEQ ID NO: 345 or 396 and light chains comprising SEQ ID NO: 341).

[0114] Alternatively, the anti-sclerostin antibody has a heavy chain comprising a polypeptide having the sequence provided in SEQ ID NO:137, and a light chain comprising a polypeptide having the sequence provided in SEQ ID NO:133; a heavy chain comprising a polypeptide having the sequence provided in SEQ ID NO:145 or 392, and a light chain comprising a polypeptide having the sequence provided in SEQ ID NO: 141; a heavy chain comprising a polypeptide having the sequence provided in SEQ ID NO:335, and a light chain comprising a polypeptide having the sequence provided in SEQ ID NO:334; a heavy chain comprising a polypeptide having the sequence provided in SEQ ID NO:331, and a light chain comprising a polypeptide having the sequence provided in SEQ ID NO:341; or a heavy chain comprising a polypeptide having the sequence provided in SEQ ID NO:345 or 396, and a light chain comprising a polypeptide having the sequence provided in SEQ ID NO:341 (as described in U.S. Patent Publication No. 2007/0110747). Alternatively, the anti-sclerostin antibody cross-blocks (or is cross-blocked by) any of the aforementioned antibodies to sclerostin.

[0115] Examples of anti-sclerostin antibodies also include, but are not limited to, the anti-sclerostin antibodies disclosed in International Patent Publication Nos. WO 2008/092894, WO 2008/115732, WO 2009/056634, WO 2009/047356, WO 2010/100200, WO 2010/100179, WO 2010/115932, and WO 2010/130830 (each of which is incorporated by reference herein in its entirety), such as an anti-sclerostin antibody comprising CDRs of SEQ ID NOs: 20-25 of International Patent Publication No. WO 2008/115732 (SEQ ID NOs: 416-421 herein), an anti-sclerostin antibody comprising CDRs of SEQ ID NOs: 26-31 of International Patent Publication No. WO 2008/115732 (SEQ ID NOs: 422-427 herein), an anti-sclerostin antibody comprising CDRs of SEQ ID NOs: 32-37 of International Patent Publication No. WO 2008/115732 (SEQ ID NOs: 428-433 herein), an anti-sclerostin antibody comprising CDRs of SEQ ID NOs: 4, 15, 26, 37, 48, and 59 of International Patent Publication No. WO 2009/047356 (SEQ ID NOs: 443, 454, 465, 476, 487 and 498, respectively, herein), or an anti-sclerostin antibody comprising the amino acid sequence of at least one of SEQ ID NOs: 135-143, 153-161, or 171-179 of International Patent Publication No. WO 2010/130830 (SEQ ID NOs: 745-753, 763-771, 781-789, respectively, herein).

[0116] Anti-DKK1 Antibodies

[0117] In some embodiments, the heterodimeric antibody described herein comprises a DKK1 binding portion comprising an anti-DKK1 antibody. An “anti-DKK1 antibody” binds to DKK1 or portions thereof to block or impair binding of human DKK1 to one or more ligands. Human DKK1 polynucleotide and amino acid sequences are set forth in SEQ ID NOs: 810 and 811, respectively. Polynucleotide and amino acid sequences for mouse and rat DKK1 are set forth in SEQ ID NOs: 812 and 813 (mouse) and SEQ ID NOs: 814 and 815 (rat). Examples of anti-DKK1 antibodies suitable for use in the context of the invention are described in International Publication No. WO 2012/118903, the disclosure of which is incorporated herein by reference. In some embodiments, the anti-DKK1 antibody cross-blocks or competes with the binding of at least one of Antibodies 11H10Hu, 11H10Rat, 2.4.1, 2.20.1, 2.37.1, 2.40.1, 2.41.1, 2.47.1, 5.17.1, 5.23.1, 5.25.1, 5.31.1, 5.32.1, 5.40.1, 5.65.1, 5.76.1, 5.77.1, 5.78.1, 5.80.1, 5.85.1, 6.37.5, 6.116.6, 6.139.5 and 6.147.4 (all of which are described in International Publication No. WO 2012/118903) to DKK1. Alternatively, or in addition, the anti-DKK1 antibody is cross-blocked from binding to DKK1 by at least one of antibodies 11H10Hu, 11H10Rat, 2.4.1, 2.20.1, 2.37.1, 2.40.1, 2.41.1, 2.47.1, 5.17.1, 5.23.1, 5.25.1, 5.31.1, 5.32.1, 5.40.1, 5.65.1, 5.76.1, 5.77.1, 5.78.1, 5.80.1, 5.85.1, 6.37.5, 6.116.6, 6.139.5 and 6.147.4. The terms “cross-block,” “cross-blocked,” and “cross-blocking” are used interchangeably herein to mean the ability of an antibody to interfere with the binding of other antibodies to DKK1. The extent to which an antibody is able to interfere with the binding of another to DKK1, and therefore whether it can be said to cross-block, can be determined using competition binding assays. In some aspects, a cross-blocking antibody or fragment thereof reduces DKK1 binding of a reference antibody between about 40% and about 100%, such as about 60% and about 100%, or between 70% and 100%, or between 80% and 100%. A particularly suitable quantitative assay for detecting cross-blocking uses a Biacore machine which measures the extent of interactions using surface plasmon resonance technology. Another suitable quantitative cross-blocking assay uses an ELISA-based approach to measure competition between antibodies in terms of their binding to DKK1.

[0118] In some embodiments, the anti-DKK1 antibody cross-blocks the binding of an immunoglobulin comprising full length heavy and light chains to DKK1 of SEQ ID NO: 811 and/or is cross-blocked from binding to DKK1 of SEQ ID NO: 811 by an immunoglobulin comprising full length heavy and light chains, wherein the immunoglobulin comprising full length heavy and light chains comprises CDR sequences disclosed herein, such as one of the following three sets of CDR sequences: SEQ ID NOs: 820-822, 828-830, 836-838, 844-846, 852-854, 860-862, 868-869, 876-878, 884-886, 892-894, 900-902, 908-910, 916-918, 925-927, 932-934, 940-942, 948-950, 956-958, 964-966, 972-974, 980-982, 988-990, 996-998, 1004-1006, 823-825, 831-833, 839-841, 847-849, 855-857, 863-865, 871-873, 879-881, 887-889, 897-897, 903-905, 911-913, 919-921, 927-929, 935-937, 943-945, 951-953, 959-961, 967-969, 975-977, 983-985, 991-993, 999-1001 and 1007-1009.

[0119] Examples of suitable anti-DKK1 antibodies and fragments thereof include antibodies and antibody fragments having one or more of CDR-H1, CDR-H2, CDR-H3, CDR-L1, CDR-L2 and CDR-L3 specifically disclosed herein and disclosed in International Publication No. WO 2012/118903, which is incorporated herein by reference in its entirety. In some embodiments, at least one of the regions of CDR-H1, CDR-H2, CDR-H3, CDR-L1, CDR-L2, and CDR-L3 may have at least one amino acid substitution, provided that the antibody retains the binding specificity of the non-substituted CDR. Exemplary anti-DKK1 antibodies include, but are not limited to, Antibodies 11H10Hu, 11H10Rat, 2.4.1, 2.20.1, 2.37.1, 2.40.1, 2.41.1, 2.47.1, 5.17.1, 5.23.1, 5.25.1, 5.31.1, 5.32.1, 5.40.1, 5.65.1, 5.76.1, 5.77.1, 5.78.1, 5.80.1, 5.85.1, 6.37.5, 6.116.6, 6.139.5 and 6.147.4 (all of which are described in International Publication No. WO 2012/118903).

[0120] In some embodiments, the anti-DKK1 antibody comprises at least one CDR having at least 75% identity (e.g., at least 80%, or at least 85%, or at least 90%, or at least 95%, or at least 100% identity) to a CDR selected from the group consisting of 820-822 (CDRL1-L3 of Ab 11H10Hu), 828-830 (CDRL1-CDRL3 of Ab 11H10Rat), 836-838 (CDRL1-CDRL3 of Ab 2.4.1), 844-846 (CDRL1-CDRL3 of Ab 2.20.1), 852-854 (CDRL1-CDRL3 of Ab 2.37.1), 860-862 (CDRL1-CDRL3 of Ab 2.40.1), 868-869 (CDRL1-CDRL3 of Ab 2.41.1), 876-878 (CDRL1-CDRL3 of Ab2.47.1), 884-886 (CDRL1-CDRL3 of Ab 5.17.1), 892-894 (CDRL1-CDRL3 of Ab 5.23.1), 900-902 (CDRL1-CDRL3 of Ab 5.25.1), 908-910 (CDRL1-CDRL3 of Ab5.31.1), 916-918 (CDRL1-CDRL3 of Ab 5.32.1), 925-927 (CDRL1-CDRL3 of Ab 5.40.1), 932-934 (CDRL1-CDRL3 of Ab 5.65.1), 940-942 (CDRL1-CDRL3 of Ab 5.76.1), 948-950 (CDRL1-CDRL3 of Ab5.77.1), 956-958 (CDRL1-CDRL3 of Ab 5.78.1), 964-966 (CDRL1-CDRL3 of Ab 5.80.1), 972-974 (CDRL1-CDRL3 of Ab 5.85.1), 980-982 (CDRL1-CDRL3 of Ab 6.37.5), 988-990 (CDRL1-CDRL3 of Ab 6.116.6), 996-998 (CDRL1-CDRL3 of Ab 6.139.5), 1004-1006 (CDRL1-CDRL3 of Ab 6.147.4), 823-825 (CDRH1-CDRH3 of Ab 11H10Hu), 831-833 (CDRH1-CDRH3 of Ab 11H10Rat), 839-841 (CDRH1-CDRH3 of Ab 2.4.1), 847-849 (CDRH1-CDRH3 of Ab 2.20.1), 855-857 (CDRH1-CDRH3 of Ab 2.37.1), 863-865 (CDRH1-CDRH3 of Ab 2.40.1), 871-873 (CDRH1-CDRH3 of Ab 2.41.1), 879-881 (CDRH1-CDRH3 of Ab 2.47.1), 887-889 (CDRH1-CDRH3 of Ab 5.17.1), 895-897 (CDRH1-CDRH3 of Ab 5.23.1), 903-905 (CDRH1-CDRH3 of Ab 5.25.1), 911-913 (CDRH1-CDRH3 of Ab 531.1), 919-921 (CDRH1-CDRH3 of Ab 5.32.1), 927-929 (CDRH1-CDRH3 of Ab 5.40.1), 935-937 (CDRH1-CDRH3 of Ab 5.65.1), 943-945 (CDRH1-CDRH3 of Ab 5.76.1), 951-953 (CDRH1-CDRH3 of Ab 5.77.1), 959-961 (CDRH1-CDRH3 of Ab 5.78.1), 967-969 (CDRH1-CDRH3 of Ab 5.80.1), 975-977 (CDRH1-CDRH3 of Ab5.85.1), 983-985 (CDRH1-CDRH3 of Ab 6.37.5), 991-993 (CDRH1-CDRH3 of Ab 6.116.6), 999-1001 (CDRH1-CDRH3 of Ab 6.139.5) and 1007-1009 (CDRH1-CDRH3 of Ab 6.147.4).

[0121] The anti-DKK1 antibody comprises, in some embodiments, having a heavy chain variable domain amino acid sequence having at least 75% identity (e.g., at least 80%, or at least 85%, or at least 90%, or at least 95%, or at least 100% identity) to an anti-DKK1 heavy chain variable domain amino acid sequence selected from the group consisting of SEQ ID NOs: 819, 827, 835, 843, 851, 859, 867, 875, 883, 891, 899, 907, 915, 923, 931, 939, 947, 955, 963, 971, 979, 987, 995 and 1003. In some embodiments, the anti-DKK1 antibody comprising a light chain variable domain amino acid sequence having at least 75% identity (e.g., at least 80%, or at least 85%, or at least 90%, or at least 95%, or at least 100% identity) to an anti-DKK1 light chain variable domain amino acid sequence selected from the group consisting of SEQ ID NOs: 818, 826, 834, 842, 850, 866, 874, 882, 890, 898, 906, 814, 822, 830, 938, 946, 954, 962, 970, 978, 988, 994 and 1002.

[0122] The DKK1 binding component(s) of the heterodimeric antibody comprises, in some embodiments, one, two, three, four, five or six of the CDRs set forth in SEQ ID NOs: of 820-822 (CDRL1-L3 of Ab 11H10Hu), 828-830 (CDRL1-CDRL3 of Ab 11H10Rat), 836-838 (CDRL1-CDRL3 of Ab 2.4.1), 844-846 (CDRL1-CDRL3 of Ab 2.20.1), 852-854 (CDRL1-CDRL3 of Ab 2.37.1), 860-862 (CDRL1-CDRL3 of Ab 2.40.1), 868-869 (CDRL1-CDRL3 of Ab 2.41.1), 876-878 (CDRL1-CDRL3 of Ab2.47.1), 884-886 (CDRL1-CDRL3 of Ab 5.17.1), 892-894 (CDRL1-CDRL3 of Ab 5.23.1), 900-902 (CDRL1-CDRL3 of Ab 5.25.1), 908-910 (CDRL1-CDRL3 of Ab5.31.1), 916-918 (CDRL1-CDRL3 of Ab 5.32.1), 925-927 (CDRL1-CDRL3 of Ab 5.40.1), 932-934 (CDRL1-CDRL3 of Ab 5.65.1), 940-942 (CDRL1-CDRL3 of Ab 5.76.1), 948-950 (CDRL1-CDRL3 of Ab5.77.1), 956-958 (CDRL1-CDRL3 of Ab 5.78.1), 964-966 (CDRL1-CDRL3 of Ab 5.80.1), 972-974 (CDRL1-CDRL3 of Ab 5.85.1), 980-982 (CDRL1-CDRL3 of Ab 6.37.5), 988-990 (CDRL1-CDRL3 of Ab 6.116.6), 996-998 (CDRL1-CDRL3 of Ab 6.139.5), 1004-1006 (CDRL1-CDRL3 of Ab 6.147.4), 823-825 (CDRH1-CDRH3 of Ab 11H10Hu), 831-833 (CDRH1-CDRH3 of Ab 11H10Rat), 839-841 (CDRH1-CDRH3 of Ab 2.4.1), 847-849 (CDRH1-CDRH3 of Ab 2.20.1), 855-857 (CDRH1-CDRH3 of Ab 2.37.1), 863-865 (CDRH1-CDRH3 of Ab 2.40.1), 871-873 (CDRH1-CDRH3 of Ab 2.41.1), 879-881 (CDRH1-CDRH3 of Ab 2.47.1), 887-889 (CDRH1-CDRH3 of Ab 5.17.1), 895-897 (CDRH1-CDRH3 of Ab 5.23.1), 903-905 (CDRH1-CDRH3 of Ab 5.25.1), 911-913 (CDRH1-CDRH3 of Ab 531.1), 919-921 (CDRH1-CDRH3 of Ab 5.32.1), 927-929 (CDRH1-CDRH3 of Ab 5.40.1), 935-937 (CDRH1-CDRH3 of Ab 5.65.1), 943-945 (CDRH1-CDRH3 of Ab 5.76.1), 951-953 (CDRH1-CDRH3 of Ab 5.77.1), 959-961 (CDRH1-CDRH3 of Ab 5.78.1), 967-969 (CDRH1-CDRH3 of Ab 5.80.1), 975-977 (CDRH1-CDRH3 of Ab5.85.1), 983-985 (CDRH1-CDRH3 of Ab 6.37.5), 991-993 (CDRH1-CDRH3 of Ab 6.116.6), 999-1001 (CDRH1-CDRH3 of Ab 6.139.5) and 1007-1009 (CDRH1-CDRH3 of Ab 6.147.4). It is contemplated that the heterodimeric antibody can include two or more CDRs from a single antibody, or two or more CDRs from any combination of the DKK1 antibodies described herein. Some DKK1 binding components include both the light chain CDR3 and the heavy chain CDR3. Certain DKK1 binding components have variant forms of the CDRs set forth in SEQ ID NOs: 820-822, 828-830, 836-838, 844-846, 852-854, 860-862, 868-869, 876-878, 884-886, 892-894, 900-902, 908-910, 916-918, 925-927, 932-934, 940-942, 948-950, 956-958, 964-966, 972-974, 980-982, 988-990, 996-998, 1004-1006, 823-825, 831-833, 839-841, 847-849, 855-857, 863-865, 871-873, 879-881, 887-889, 897-897, 903-905, 911-913, 919-921, 927-929, 935-937, 943-945, 951-953, 959-961, 967-969, 975-977, 983-985, 991-993, 999-1001 and 1007-1009, with one or more (i.e., 2, 3, 4, 5 or 6) of the CDRs each having at least 80%, 85%, 90% or 95% sequence identity to a CDR sequence set forth in SEQ ID NOs: 820-822, 828-830, 836-838, 844-846, 852-854, 860-862, 868-869, 876-878, 884-886, 892-894, 900-902, 908-910, 916-918, 925-927, 932-934, 940-942, 948-950, 956-958, 964-966, 972-974, 980-982, 988-990, 996-998, 1004-1006, 823-825, 831-833, 839-841, 847-849, 855-857, 863-865, 871-873, 879-881, 887-889, 897-897, 903-905, 911-913, 919-921, 927-929, 935-937, 943-945, 951-953, 959-961, 967-969, 975-977, 983-985, 991-993, 999-1001 and 1007-1009. For example, the DKK1 binding components of the heterodimeric antibody can include both a light chain CDR3 and a heavy chain CDR3 that each have at least 80%, 85%, 90% or 95% sequence identity to a light chain CDR3 sequence selected from the group consisting of SEQ ID NOs: 822, 830, 838, 846, 854, 862, 870, 878, 886, 894, 902, 910, 918, 926, 934, 942, 950, 958, 966, 974, 982, 990, 998 and 1006; and have at least 80%, 85%, 90% or 95% sequence identity to a heavy chain CDR3 sequence selected from the group consisting of 825, 833, 841, 849, 857, 865, 873, 881, 889, 897, 905, 913, 921, 929, 937, 945, 953, 961, 969, 977, 985, 993, 1001 and 1009.

[0123] The CDR sequences of some of the DKK1 binding components that are provided may also differ from the CDR sequences set forth in SEQ ID NOs: 820-822, 828-830, 836-838, 844-846, 852-854, 860-862, 868-869, 876-878, 884-886, 892-894, 900-902, 908-910, 916-918, 925-927, 932-934, 940-942, 948-950, 956-958, 964-966, 972-974, 980-982, 988-990, 996-998, 1004-1006, 823-825, 831-833, 839-841, 847-849, 855-857, 863-865, 871-873, 879-881, 887-889, 897-897, 903-905, 911-913, 919-921, 927-929, 935-937, 943-945, 951-953, 959-961, 967-969, 975-977, 983-985, 991-993, 999-1001 and 1007-1009 such that the amino acid sequence for any given CDR differs by no more than 1, 2, 3, 4 or 5 amino acid residues. Differences from the listed sequences are typically, but not limited to, conservative substitutions.

[0124] In other embodiments, the portion of the heterodimeric molecule that binds to DKK1 is selected from those DKK1 binding molecules disclosed in U.S. Pat. No. 7,709,611, U.S. Patent Publ. No. 2008/0193449, U.S. Pat. No. 7,642,238, U.S. Pat. No. 7,700,101, and WO 2007/084344, the disclosure of all of which are incorporated herein by reference in their entireties.

[0125] Polynucleotides Encoding Engineered Heavy or Light Chains

[0126] Encompassed within the invention are nucleic acids encoding heavy and/or light chain constant and/or variable domains described herein. Nucleic acid molecules of the invention include DNA and RNA in both single-stranded and double-stranded form, as well as the corresponding complementary sequences. DNA includes, for example, cDNA, genomic DNA, chemically synthesized DNA, DNA amplified by PCR, and combinations thereof. The nucleic acid molecules of the invention include full-length genes or cDNA molecules as well as a combination of fragments thereof. The nucleic acids of the invention are preferentially derived from human sources, but the invention includes those derived from non-human species, as well.

[0127] An “isolated nucleic acid” is a nucleic acid that has been separated from adjacent genetic sequences present in the genome of the organism from which the nucleic acid was isolated, in the case of nucleic acids isolated from naturally-occurring sources. In the case of nucleic acids synthesized enzymatically from a template or chemically, such as PCR products, cDNA molecules, or oligonucleotides for example, it is understood that the nucleic acids resulting from such processes are isolated nucleic acids. An isolated nucleic acid molecule refers to a nucleic acid molecule in the form of a separate fragment or as a component of a larger nucleic acid construct. In one preferred embodiment, the nucleic acids are substantially free from contaminating endogenous material. The nucleic acid molecule has preferably been derived from DNA or RNA isolated at least once in substantially pure form and in a quantity or concentration enabling identification, manipulation, and recovery of its component nucleotide sequences by standard biochemical methods (such as those outlined in Sambrook et al., Molecular Cloning: A Laboratory Manual, 2nd ed., Cold Spring Harbor Laboratory, Cold Spring Harbor, N.Y. (1989)). Such sequences are preferably provided and/or constructed in the form of an open reading frame uninterrupted by internal non-translated sequences, or introns, that are typically present in eukaryotic genes. Sequences of non-translated DNA can be present 5′ or 3′ from an open reading frame, where the same do not interfere with manipulation or expression of the coding region.

[0128] The present invention also includes nucleic acids that hybridize under moderately stringent conditions, and more preferably highly stringent conditions, to nucleic acids encoding polypeptides as described herein. The basic parameters affecting the choice of hybridization conditions and guidance for devising suitable conditions are set forth by Sambrook, Fritsch, and Maniatis (1989, Molecular Cloning: A Laboratory Manual, Cold Spring Harbor Laboratory Press, Cold Spring Harbor, N.Y., chapters 9 and 11; and Current Protocols in Molecular Biology, 1995, Ausubel et al., eds., John Wiley & Sons, Inc., sections 2.10 and 6.3-6.4), and can be readily determined by those having ordinary skill in the art based on, for example, the length and/or base composition of the DNA. One way of achieving moderately stringent conditions involves the use of a prewashing solution containing 5×SSC, 0.5% SDS, 1.0 mM EDTA (pH 8.0), hybridization buffer of about 50% formamide, 6×SSC, and a hybridization temperature of about 55 degrees C. (or other similar hybridization solutions, such as one containing about 50% formamide, with a hybridization temperature of about 42 degrees C.), and washing conditions of about 60 degrees C., in 0.5×SSC, 0.1% SDS. Generally, highly stringent conditions are defined as hybridization conditions as above, but with washing at approximately 68 degrees C., 0.2×SSC, 0.1% SDS. SSPE (1×SSPE is 0.15M NaCl, 10 mM NaH.sub.2 PO.sub.4, and 1.25 mM EDTA, pH 7.4) can be substituted for SSC (1×SSC is 0.15M NaCl and 15 mM sodium citrate) in the hybridization and wash buffers; washes are performed for 15 minutes after hybridization is complete. It should be understood that the wash temperature and wash salt concentration can be adjusted as necessary to achieve a desired degree of stringency by applying the basic principles that govern hybridization reactions and duplex stability, as known to those skilled in the art and described further below (see, e.g., Sambrook et al., 1989). When hybridizing a nucleic acid to a target nucleic acid of unknown sequence, the hybrid length is assumed to be that of the hybridizing nucleic acid. When nucleic acids of known sequence are hybridized, the hybrid length can be determined by aligning the sequences of the nucleic acids and identifying the region or regions of optimal sequence complementarity. The hybridization temperature for hybrids anticipated to be less than 50 base pairs in length should be 5 to 10.degrees C. less than the melting temperature (Tm) of the hybrid, where Tm is determined according to the following equations. For hybrids less than 18 base pairs in length, Tm (degrees C.)=2(# of A+T bases)+4(# of #G+C bases). For hybrids above 18 base pairs in length, Tm (degrees C.)=81.5+16.6(log 10 [Na+])+0.41(% G+C)−(600/N), where N is the number of bases in the hybrid, and [Na+] is the concentration of sodium ions in the hybridization buffer ([Na+] for 1×SSC=0.165M). Preferably, each such hybridizing nucleic acid has a length that is at least 15 nucleotides (or more preferably at least 18 nucleotides, or at least 20 nucleotides, or at least 25 nucleotides, or at least 30 nucleotides, or at least 40 nucleotides, or most preferably at least 50 nucleotides), or at least 25% (more preferably at least 50%, or at least 60%, or at least 70%, and most preferably at least 80%) of the length of the nucleic acid of the present invention to which it hybridizes, and has at least 60% sequence identity (more preferably at least 70%, at least 75%, at least 80%, at least 81%, at least 82%, at least 83%, at least 84%, at least 85%, at least 86%, at least 87%, at least 88%, at least 89%, at least 90%, at least 91%, at least 92%, at least 93%, at least 94%, at least 95%, at least 96%, at least 97%, at least 98%, or at least 99%, and most preferably at least 99.5%) with the nucleic acid of the present invention to which it hybridizes, where sequence identity is determined by comparing the sequences of the hybridizing nucleic acids when aligned so as to maximize overlap and identity while minimizing sequence gaps as described in more detail above.

[0129] Variants are ordinarily prepared by site specific mutagenesis of nucleotides in the DNA encoding the polypeptide, using cassette or PCR mutagenesis or other techniques well known in the art, to produce DNA encoding the variant, and thereafter expressing the recombinant DNA in cell culture as outlined herein. However, antibodies or antibody fragments comprising variant CDRs having up to about 100-150 residues may be prepared by in vitro synthesis using established techniques. The variants typically exhibit the same qualitative biological activity as the naturally occurring analogue, e.g., binding to antigen, although variants can also be selected which have modified characteristics as will be more fully outlined herein.

[0130] As will be appreciated by those in the art, due to the degeneracy of the genetic code, an extremely large number of nucleic acids may be made, all of which encode the CDRs (and heavy and light chains or other components of a heterodimeric antibody described herein) of the invention. Thus, having identified a particular amino acid sequence, those skilled in the art could make any number of different nucleic acids, by simply modifying the sequence of one or more codons in a way which does not change the amino acid sequence of the encoded protein.

[0131] The invention also provides expression systems and constructs in the form of plasmids, expression vectors, transcription or expression cassettes which comprise at least one polynucleotide as above. In addition, the invention provides host cells comprising such expression systems or constructs.

[0132] Typically, expression vectors used in the host cells will contain sequences for plasmid maintenance and for cloning and expression of exogenous nucleotide sequences. Such sequences, collectively referred to as “flanking sequences,” in certain embodiments will typically include one or more of the following nucleotide sequences: a promoter, one or more enhancer sequences, an origin of replication, a transcriptional termination sequence, a complete intron sequence containing a donor and acceptor splice site, a sequence encoding a leader sequence for polypeptide secretion, a ribosome binding site, a polyadenylation sequence, a polylinker region for inserting the nucleic acid encoding the polypeptide to be expressed, and a selectable marker element. Each of these sequences is discussed below.

[0133] Optionally, the vector may contain a “tag”-encoding sequence, i.e., an oligonucleotide molecule located at the 5′ or 3′ end of the polypeptide coding sequence; the oligonucleotide sequence encodes polyHis (such as hexaHis), or another “tag” such as FLAG, HA (hemaglutinin influenza virus), or myc, for which commercially available antibodies exist. This tag is typically fused to the polypeptide upon expression of the polypeptide, and can serve as a means for affinity purification or detection of the polypeptide from the host cell. Affinity purification can be accomplished, for example, by column chromatography using antibodies against the tag as an affinity matrix. Optionally, the tag can subsequently be removed from the purified polypeptide by various means such as using certain peptidases for cleavage.

[0134] Flanking sequences may be homologous (i.e., from the same species and/or strain as the host cell), heterologous (i.e., from a species other than the host cell species or strain), hybrid (i.e., a combination of flanking sequences from more than one source), synthetic or native. As such, the source of a flanking sequence may be any prokaryotic or eukaryotic organism, any vertebrate or invertebrate organism, or any plant, provided that the flanking sequence is functional in, and can be activated by, the host cell machinery.

[0135] Flanking sequences useful in the vectors of this invention may be obtained by any of several methods well known in the art. Typically, flanking sequences useful herein will have been previously identified by mapping and/or by restriction endonuclease digestion and can thus be isolated from the proper tissue source using the appropriate restriction endonucleases. In some cases, the full nucleotide sequence of a flanking sequence may be known. Here, the flanking sequence may be synthesized using the methods described herein for nucleic acid synthesis or cloning.

[0136] Whether all or only a portion of the flanking sequence is known, it may be obtained using polymerase chain reaction (PCR) and/or by screening a genomic library with a suitable probe such as an oligonucleotide and/or flanking sequence fragment from the same or another species. Where the flanking sequence is not known, a fragment of DNA containing a flanking sequence may be isolated from a larger piece of DNA that may contain, for example, a coding sequence or even another gene or genes. Isolation may be accomplished by restriction endonuclease digestion to produce the proper DNA fragment followed by isolation using agarose gel purification, Qiagen® column chromatography (Chatsworth, Calif.), or other methods known to the skilled artisan. The selection of suitable enzymes to accomplish this purpose will be readily apparent to one of ordinary skill in the art.

[0137] An origin of replication is typically a part of those prokaryotic expression vectors purchased commercially, and the origin aids in the amplification of the vector in a host cell. If the vector of choice does not contain an origin of replication site, one may be chemically synthesized based on a known sequence, and ligated into the vector. For example, the origin of replication from the plasmid pBR322 (New England Biolabs, Beverly, Mass.) is suitable for most gram-negative bacteria, and various viral origins (e.g., SV40, polyoma, adenovirus, vesicular stomatitus virus (VSV), or papillomaviruses such as HPV or BPV) are useful for cloning vectors in mammalian cells. Generally, the origin of replication component is not needed for mammalian expression vectors (for example, the SV40 origin is often used only because it also contains the virus early promoter).

[0138] A transcription termination sequence is typically located 3′ to the end of a polypeptide coding region and serves to terminate transcription. Usually, a transcription termination sequence in prokaryotic cells is a G-C rich fragment followed by a poly-T sequence. While the sequence is easily cloned from a library or even purchased commercially as part of a vector, it can also be readily synthesized using methods for nucleic acid synthesis such as those described herein.

[0139] A selectable marker gene encodes a protein necessary for the survival and growth of a host cell grown in a selective culture medium. Typical selection marker genes encode proteins that (a) confer resistance to antibiotics or other toxins, e.g., ampicillin, tetracycline, or kanamycin for prokaryotic host cells; (b) complement auxotrophic deficiencies of the cell; or (c) supply critical nutrients not available from complex or defined media. Specific selectable markers are the kanamycin resistance gene, the ampicillin resistance gene, and the tetracycline resistance gene. Advantageously, a neomycin resistance gene may also be used for selection in both prokaryotic and eukaryotic host cells.

[0140] Other selectable genes may be used to amplify the gene that will be expressed. Amplification is the process wherein genes that are required for production of a protein critical for growth or cell survival are reiterated in tandem within the chromosomes of successive generations of recombinant cells. Examples of suitable selectable markers for mammalian cells include dihydrofolate reductase (DHFR) and promoterless thyrnidine kinase genes. Mammalian cell transformants are placed under selection pressure wherein only the transformants are uniquely adapted to survive by virtue of the selectable gene present in the vector. Selection pressure is imposed by culturing the transformed cells under conditions in which the concentration of selection agent in the medium is successively increased, thereby leading to the amplification of both the selectable gene and the DNA that encodes another gene, such as an antibody light or heavy chain. As a result, increased quantities of a polypeptide are synthesized from the amplified DNA.

[0141] A ribosome-binding site is usually necessary for translation initiation of mRNA and is characterized by a Shine-Dalgarno sequence (prokaryotes) or a Kozak sequence (eukaryotes). The element is typically located 3′ to the promoter and 5′ to the coding sequence of the polypeptide to be expressed. In certain embodiments, one or more coding regions may be operably linked to an internal ribosome binding site (IRES), allowing translation of two open reading frames from a single RNA transcript.

[0142] In some cases, such as where glycosylation is desired in a eukaryotic host cell expression system, one may manipulate the various pre- or prosequences to improve glycosylation or yield. For example, one may alter the peptidase cleavage site of a particular signal peptide, or add prosequences, which also may affect glycosylation. The final protein product may have, in the −1 position (relative to the first amino acid of the mature protein) one or more additional amino acids incident to expression, which may not have been totally removed. For example, the final protein product may have one or two amino acid residues found in the peptidase cleavage site, attached to the amino-terminus. Alternatively, use of some enzyme cleavage sites may result in a slightly truncated form of the desired polypeptide, if the enzyme cuts at such area within the mature polypeptide.

[0143] Expression and cloning vectors of the invention will typically contain a promoter that is recognized by the host organism and operably linked to the molecule encoding the polypeptide. Promoters are untranscribed sequences located upstream (i.e., 5′) to the start codon of a structural gene (generally within about 100 to 1000 bp) that control transcription of the structural gene. Promoters are conventionally grouped into one of two classes: inducible promoters and constitutive promoters. Inducible promoters initiate increased levels of transcription from DNA under their control in response to some change in culture conditions, such as the presence or absence of a nutrient or a change in temperature. Constitutive promoters, on the other hand, uniformly transcribe gene to which they are operably linked, that is, with little or no control over gene expression. A large number of promoters, recognized by a variety of potential host cells, are well known. A suitable promoter is operably linked to the DNA encoding e.g., heavy chain or light chain, by removing the promoter from the source DNA by restriction enzyme digestion and inserting the desired promoter sequence into the vector.

[0144] Suitable promoters for use with yeast hosts are also well known in the art. Yeast enhancers are advantageously used with yeast promoters. Suitable promoters for use with mammalian host cells are well known and include, but are not limited to, those obtained from the genomes of viruses such as polyoma virus, fowlpox virus, adenovirus (such as Adenovirus 2), bovine papilloma virus, avian sarcoma virus, cytomegalovirus, retroviruses, hepatitis-B virus and most preferably Simian Virus 40 (SV40). Other suitable mammalian promoters include heterologous mammalian promoters, for example, heat-shock promoters and the actin promoter.

[0145] Additional promoters which may be of interest include, but are not limited to: SV40 early promoter (Benoist and Chambon, 1981, Nature 290:304-310); CMV promoter (Thomsen et al., 1984, Proc. Natl. Acad. U.S.A. 81:659-663); the promoter contained in the 3′ long terminal repeat of Rous sarcoma virus (Yamamoto et al., 1980, Cell 22:787-797); herpes thymidine kinase promoter (Wagner et al., 1981, Proc. Natl. Acad. Sci. U.S.A. 78:1444-1445); promoter and regulatory sequences from the metallothionine gene Prinster et al., 1982, Nature 296:39-42); and prokaryotic promoters such as the beta-lactamase promoter (Villa-Kamaroff et al., 1978, Proc. Natl. Acad. Sci. U.S.A. 75:3727-3731); or the tac promoter (DeBoer et al., 1983, Proc. Natl. Acad. Sci. U.S.A. 80:21-25). Also of interest are the following animal transcriptional control regions, which exhibit tissue specificity and have been utilized in transgenic animals: the elastase I gene control region that is active in pancreatic acinar cells (Swift et al., 1984, Cell 38:639-646; Ornitz et al., 1986, Cold Spring Harbor Symp. Quant. Biol. 50:399-409; MacDonald, 1987, Hepatology 7:425-515); the insulin gene control region that is active in pancreatic beta cells (Hanahan, 1985, Nature 315:115-122); the immunoglobulin gene control region that is active in lymphoid cells (Grosschedl et al., 1984, Cell 38:647-658; Adames et al., 1985, Nature 318:533-538; Alexander et al., 1987, Mol. Cell. Biol. 7:1436-1444); the mouse mammary tumor virus control region that is active in testicular, breast, lymphoid and mast cells (Leder et al., 1986, Cell 45:485-495); the albumin gene control region that is active in liver (Pinkert et al., 1987, Genes and Devel. 1:268-276); the alpha-feto-protein gene control region that is active in liver (Krumlauf et al., 1985, Mol. Cell. Biol. 5:1639-1648; Hammer et al., 1987, Science 253:53-58); the alpha 1-antitrypsin gene control region that is active in liver (Kelsey et al., 1987, Genes and Devel. 1:161-171); the beta-globin gene control region that is active in myeloid cells (Mogram et al., 1985, Nature 315:338-340; Kollias et al., 1986, Cell 46:89-94); the myelin basic protein gene control region that is active in oligodendrocyte cells in the brain (Readhead et al., 1987, Cell 48:703-712); the myosin light chain-2 gene control region that is active in skeletal muscle (Sani, 1985, Nature 314:283-286); and the gonadotropic releasing hormone gene control region that is active in the hypothalamus (Mason et al., 1986, Science 234:1372-1378).

[0146] An enhancer sequence may be inserted into the vector to increase transcription of DNA encoding light chain or heavy chain of the invention by higher eukaryotes. Enhancers are cis-acting elements of DNA, usually about 10-300 by in length, that act on the promoter to increase transcription. Enhancers are relatively orientation and position independent, having been found at positions both 5′ and 3′ to the transcription unit. Several enhancer sequences available from mammalian genes are known (e.g., globin, elastase, albumin, alpha-feto-protein and insulin). Typically, however, an enhancer from a virus is used. The SV40 enhancer, the cytomegalovirus early promoter enhancer, the polyoma enhancer, and adenovirus enhancers known in the art are exemplary enhancing elements for the activation of eukaryotic promoters. While an enhancer may be positioned in the vector either 5′ or 3′ to a coding sequence, it is typically located at a site 5′ from the promoter. A sequence encoding an appropriate native or heterologous signal sequence (leader sequence or signal peptide) can be incorporated into an expression vector, to promote extracellular secretion of the antibody. The choice of signal peptide or leader depends on the type of host cells in which the antibody is to be produced, and a heterologous signal sequence can replace the native signal sequence. Examples of signal peptides that are functional in mammalian host cells include the following: the signal sequence for interleukin-7 (IL-7) described in U.S. Pat. No. 4,965,195; the signal sequence for interleukin-2 receptor described in Cosman et al., 1984, Nature 312:768; the interleukin-4 receptor signal peptide described in EP Patent No. 0367 566; the type I interleukin-1 receptor signal peptide described in U.S. Pat. No. 4,968,607; the type II interleukin-1 receptor signal peptide described in EP Patent No. 0 460 846.

[0147] The vector may contain one or more elements that facilitate expression when the vector is integrated into the host cell genome. Examples include an EASE element (Aldrich et al. 2003 Biotechnol Prog. 19:1433-38) and a matrix attachment region (MAR). MARs mediate structural organization of the chromatin and may insulate the integrated vactor from “position” effect. Thus, MARs are particularly useful when the vector is used to create stable transfectants. A number of natural and synthetic MAR-containing nucleic acids are known in the art, e.g., U.S. Pat. Nos. 6,239,328; 7,326,567; 6,177,612; 6,388,066; 6,245,974; 7,259,010; 6,037,525; 7,422,874; 7,129,062.

[0148] Expression vectors of the invention may be constructed from a starting vector such as a commercially available vector. Such vectors may or may not contain all of the desired flanking sequences. Where one or more of the flanking sequences described herein are not already present in the vector, they may be individually obtained and ligated into the vector. Methods used for obtaining each of the flanking sequences are well known to one skilled in the art.

[0149] After the vector has been constructed and a nucleic acid molecule encoding light chain, a heavy chain, or a light chain and a heavy chain sequence has been inserted into the proper site of the vector, the completed vector may be inserted into a suitable host cell for amplification and/or polypeptide expression. The transformation of an expression vector into a selected host cell may be accomplished by well known methods including transfection, infection, calcium phosphate co-precipitation, electroporation, microinjection, lipofection, DEAE-dextran mediated transfection, or other known techniques. The method selected will in part be a function of the type of host cell to be used. These methods and other suitable methods are well known to the skilled artisan, and are set forth, for example, in Sambrook et al., 2001, supra.

[0150] A host cell, when cultured under appropriate conditions, synthesizes heterodimeric antibody that can subsequently be collected from the culture medium (if the host cell secretes it into the medium) or directly from the host cell producing it (if it is not secreted). The selection of an appropriate host cell will depend upon various factors, such as desired expression levels, polypeptide modifications that are desirable or necessary for activity (such as glycosylation or phosphorylation) and ease of folding into a biologically active molecule. A host cell may be eukaryotic or prokaryotic.

[0151] Mammalian cell lines available as hosts for expression are well known in the art and include, but are not limited to, immortalized cell lines available from the American Type Culture Collection (ATCC) and any cell lines used in an expression system known in the art can be used to make the recombinant polypeptides of the invention. In general, host cells are transformed with a recombinant expression vector that comprises DNA encoding a desired heterodimeric antibody. Among the host cells that may be employed are prokaryotes, yeast or higher eukaryotic cells. Prokaryotes include gram negative or gram positive organisms, for example E. coli or bacilli. Higher eukaryotic cells include insect cells and established cell lines of mammalian origin. Examples of suitable mammalian host cell lines include the COS-7 line of monkey kidney cells (ATCC CRL 1651) (Gluzman et al., 1981, Cell 23:175), L cells, 293 cells, C127 cells, 3T3 cells (ATCC CCL 163), Chinese hamster ovary (CHO) cells, or their derivatives such as Veggie CHO and related cell lines which grow in serum-free media (Rasmussen et al., 1998, Cytotechnology 28: 31), HeLa cells, BHK (ATCC CRL 10) cell lines, and the CV1/EBNA cell line derived from the African green monkey kidney cell line CV1 (ATCC CCL 70) as described by McMahan et al., 1991, EMBO J. 10: 2821, human embryonic kidney cells such as 293, 293 EBNA or MSR 293, human epidermal A431 cells, human Colo205 cells, other transformed primate cell lines, normal diploid cells, cell strains derived from in vitro culture of primary tissue, primary explants, HL-60, U937, HaK or Jurkat cells. Optionally, mammalian cell lines such as HepG2/3B, KB, NIH 3T3 or S49, for example, can be used for expression of the polypeptide when it is desirable to use the polypeptide in various signal transduction or reporter assays. Alternatively, it is possible to produce the polypeptide in lower eukaryotes such as yeast or in prokaryotes such as bacteria. Suitable yeasts include Saccharomyces cerevisiae, Schizosaccharomyces pombe, Kluyveromyces strains, Candida, or any yeast strain capable of expressing heterologous polypeptides. Suitable bacterial strains include Escherichia coli, Bacillus subtilis, Salmonella typhimurium, or any bacterial strain capable of expressing heterologous polypeptides.

[0152] If the antibody or fragment is made in yeast or bacteria, it may be desirable to modify the product produced therein, for example by phosphorylation or glycosylation of the appropriate sites, in order to obtain a functional product. Such covalent attachments can be accomplished using known chemical or enzymatic methods. A polypeptide can also be produced by operably linking the isolated nucleic acid of the invention to suitable control sequences in one or more insect expression vectors, and employing an insect expression system. Materials and methods for baculovirus/insect cell expression systems are commercially available in kit form from, e.g., Invitrogen, San Diego, Calif., U.S.A. (the MaxBac□ kit), and such methods are well known in the art, as described in Summers and Smith, Texas Agricultural Experiment Station Bulletin No. 1555 (1987), and Luckow and Summers, Bio/Technology 6:47 (1988). Cell-free translation systems could also be employed to produce polypeptides, such as antibodies or fragments, using RNAs derived from nucleic acid constructs disclosed herein. Appropriate cloning and expression vectors for use with bacterial, fungal, yeast, and mammalian cellular hosts are described by Pouwels et al. (Cloning Vectors: A Laboratory Manual, Elsevier, New York, 1985). A host cell that comprises an isolated nucleic acid of the invention, preferably operably linked to at least one expression control sequence, is a “recombinant host cell”.

[0153] In certain embodiments, cell lines may be selected through determining which cell lines have high expression levels and constitutively produce antigen binding proteins with the desired binding properties. In another embodiment, a cell line from the B cell lineage that does not make its own antibody but has a capacity to make and secrete a heterologous antibody can be selected.

[0154] Therapeutic Methods

[0155] The heterodimeric antibody molecules described herein are useful for treating or preventing bone-related disorders, such as bone-related disorders associated with abnormal osteoblast or osteoclast activity. In some embodiments, the heterodimeric antibody is administered to a subject suffering from a bone related disorder selected from the group consisting of achondroplasia, cleidocranial dysostosis, enchondromatosis, fibrous dysplasia, Gaucher's Disease, hypophosphatemic rickets, Marfan's syndrome, multiple hereditary exotoses, neurofibromatosis, osteogenesis imperfecta, osteopetrosis, osteopoikilosis, sclerotic lesions, pseudoarthrosis, pyogenic osteomyelitis, periodontal disease, anti-epileptic drug induced bone loss, primary and secondary hyperparathyroidism, familial hyperparathyroidism syndromes, weightlessness induced bone loss, osteoporosis in men, postmenopausal bone loss, osteoarthritis, renal osteodystrophy, infiltrative disorders of bone, oral bone loss, osteonecrosis of the jaw, juvenile Paget's disease, melorheostosis, metabolic bone diseases, mastocytosis, sickle cell anemia/disease, organ transplant related bone loss, kidney transplant related bone loss, systemic lupus erythematosus, ankylosing spondylitis, epilepsy, juvenile arthritides, thalassemia, mucopolysaccharidoses, Fabry Disease, Turner Syndrome, Down Syndrome, Klinefelter Syndrome, leprosy, Perthe's Disease, adolescent idiopathic scoliosis, infantile onset multi-system inflammatory disease, Winchester Syndrome, Menkes Disease, Wilson's Disease, ischemic bone disease (such as Legg-Calve-Perthes disease and regional migratory osteoporosis), anemic states, conditions caused by steroids, glucocorticoid-induced bone loss, heparin-induced bone loss, bone marrow disorders, scurvy, malnutrition, calcium deficiency, osteoporosis, osteopenia, alcoholism, chronic liver disease, postmenopausal state, chronic inflammatory conditions, rheumatoid arthritis, inflammatory bowel disease, ulcerative colitis, inflammatory colitis, Crohn's disease, oligomenorrhea, amenorrhea, pregnancy-related bone loss, diabetes mellitus, hyperthyroidism, thyroid disorders, parathyroid disorders, Cushing's disease, acromegaly, hypogonadism, immobilization or disuse, reflex sympathetic dystrophy syndrome, regional osteoporosis, osteomalacia, bone loss associated with joint replacement, HIV associated bone loss, bone loss associated with loss of growth hormone, bone loss associated with cystic fibrosis, chemotherapy-associated bone loss, tumor-induced bone loss, cancer-related bone loss, hormone ablative bone loss, multiple myeloma, drug-induced bone loss, anorexia nervosa, disease-associated facial bone loss, disease-associated cranial bone loss, disease-associated bone loss of the jaw, disease-associated bone loss of the skull, bone loss associated with aging, facial bone loss associated with aging, cranial bone loss associated with aging, jaw bone loss associated with aging, skull bone loss associated with aging, and bone loss associated with space travel.

[0156] In some embodiments, the heterodimeric antibodies described herein are useful for improving outcomes in orthopedic procedures, dental procedures, implant surgery, joint replacement, bone grafting, bone cosmetic surgery and bone repair such as fracture healing, nonunion healing, delayed union healing and facial reconstruction. A composition comprising one or more heterodimeric antibodies or fragments may be administered before, during and/or after the procedure, replacement, graft, surgery or repair.

[0157] The heterodimeric antibody need not cure the subject of the disorder or completely protect against the onset of a bone-related disorder to achieve a beneficial biological response. The heterodimeric antibody may be used prophylactically, meaning to protect, in whole or in part, against a bone-related disorder or symptom thereof. The heterodimeric antibody also may be used therapeutically to ameliorate, in whole or in part, a bone-related disorder or symptom thereof, or to protect, in whole or in part, against further progression of a bone-related disorder or symptom thereof. Indeed, the materials and methods of the invention are particularly useful for increasing bone mineral density and maintaining the increased bone mineral density over a period of time.

[0158] In some embodiments, one or more administrations of a heterodimeric antibody described herein are carried out over a therapeutic period of, for example, about 1 week to about 18 months (e.g., about 1 month to about 12 months, about 1 month to about 9 months or about 1 month to about 6 months or about 1 month to about 3 months). In some embodiments, a subject is administered one or more doses of a heterodimeric antibody described herein over a therapeutic period of, for example about 1 month to about 12 months (52 weeks) (e.g., about 2 months, about 3 months, about 4 months, about 5 months, about 6 months, about 7 months, about 8 months, about 9 months, about 10 months, or about 11 months). In some embodiments, a subject is administered one or more doses of the heterodimeric antibody to maintain bone mineral density. The term “maintain bone mineral density” as used herein means that the increased bone mineral density resulting from the initial dose of the heterodimeric antibody does not fall more than about 1% to about 5% over the course of about 6 months, about 9 months about 1 year, about 18 months, about 2 years, or over the course of the patient's life). It will be appreciated that a patient can require alternate treatment phases for increasing bone density and maintaining bone density.

[0159] In addition, it may be advantageous to administer multiple doses of the heterodimeric antibody or space out the administration of doses, depending on the therapeutic regimen selected for a particular subject. In some embodiments, the heterodimeric antibody or fragment thereof is administered periodically over a time period of one year (12 months, 52 weeks) or less (e.g., 9 months or less, 6 months or less, or 3 months or less). In this regard, the heterodimeric antibody or fragment thereof is administered to the human once every about 3 days, or about 7 days, or 2 weeks, or 3 weeks, or 4 weeks, or 5 weeks, or 6 weeks, or 7 weeks, or 8 weeks, or 9 weeks, or 10 weeks, or 11 weeks, or 12 weeks, or 13 weeks, or 14 weeks, or 15 weeks, or 16 weeks, or 17 weeks, or 18 weeks, or 19 weeks, or 20 weeks, or 21 weeks, or 22 weeks, or 23 weeks, or 6 months, or 12 months.

[0160] In some embodiments, one or more doses of the heterodimeric antibody or fragment thereof are administered in an amount and for a time effective to treat a bone disorder associated with decreased bone mineral density. In various embodiments, one or more doses comprising from about 50 milligrams to about 1,000 milligrams of the heterodimeric antibody are administered per week to a subject (e.g., a human subject). For example, a dose of heterodimeric antibody can comprise at least about 5 mg, 15 mg, 25 mg, 50 mg, about 60 mg, about 70 mg, about 80 mg, about 90 mg, about 100 mg, about 120 mg, about 150 mg, about 200 mg, about 240 mg, about 250 mg, about 280 mg, about 300 mg, about 350 mg, about 400 mg, about 420 mg, about 450 mg, about 500 mg, about 550 mg, about 600 mg, about 650 mg, about 700 mg, about 750 mg, about 800 mg, about 850 mg, about 900 mg, about 950 mg or up to about 1,000 mg of heterodimeric antibody. Ranges between any and all of these endpoints are also contemplated, e.g. about 50 mg to about 80 mg, about 70 mg to about 140 mg, about 70 mg to about 270 mg, about 75 mg to about 100 mg, about 100 mg to about 150 mg, about 140 mg to about 210 mg, or about 150 mg to about 200 mg, or about 180 mg to about 270 mg, or about 280 to about 410 mg. The dose is administered at any interval, such as multiple times a week (e.g., twice or three times per week), once a week, once every two weeks, once every three weeks, or once every four weeks. In some or any embodiments, a dose of heterodimeric antibody ranging from about 120 mg to about 210 mg is administered twice a week. In some or any embodiments, a dose of about 140 mg of the heterodimeric antibody is administered twice a week.

[0161] In some embodiments, the one or more doses of heterodimeric antibody can comprise between about 0.1 to about 50 milligrams (e.g., between about 5 and about 50 milligrams), or about 1 to about 100 milligrams, of heterodimeric antibody per kilogram of body weight (mg/kg). For example, the dose of heterodimeric antibody may comprise at least about 0.1 mg/kg, 0.5 mg/kg, 1 mg/kg, about 2 mg/kg, about 3 mg/kg, about 4 mg/kg, about 5 mg/kg, about 6 mg/kg, about 7 mg/kg, about 8 mg/kg, about 9 mg/kg, about 10 mg/kg, about 20 mg/kg, about 25 mg/kg, about 26 mg/kg, about 27 mg/kg, about 28 mg/kg, about 29 mg/kg, about 30 mg/kg, about 31 mg/kg, about 32 mg/kg, about 33 mg/kg, about 34 mg/kg, about 35 mg/kg, about 36 mg/kg, about 37 mg/kg, about 38 mg/kg, about 39 mg/kg, about 40 mg/kg, about 41 mg/kg, about 42 mg/kg, about 43 mg/kg, about 44 mg/kg, about 45 mg/kg, about 46 mg/kg, about 47 mg/kg, about 48 mg/kg, or about 49 mg/kg, or about 50 mg/kg, about 55 mg/kg, about 60 mg/kg, about 65 mg/kg, about 70 mg/kg, about 75 mg/kg, about 80 mg/kg, about 85 mg/kg, about 90 mg/kg, about 95 mg/kg, or up to about 100 mg/kg. Ranges between any and all of these endpoints are also contemplated, e.g., about 1 mg/kg to about 3 mg/kg, about 1 mg/kg to about 5 mg/kg, about 1 mg/kg to about 8 mg/kb, about 3 mg/kg to about 8 mg·kg, about 1 mg/kg to about 10 mg/kg, about 1 mg/kg to about 20 mg/kg, about 1 mg/kg to about 40 mg/kg, about 5 mg/kg to about 30 mg/kg, or about 5 mg/kg to about 20 mg/kg.

[0162] Monitoring Therapy

[0163] Heterodimeric antibody-mediated increases in bone mineral content or bone density may be measured using single- and dual-energy X-ray absorptometry, ultrasound, computed tomography, radiography, and magnetic resonance imaging. The amount of bone mass may also be calculated from body weights or by using other methods (see Guinness-Hey, Metab. Bone Dis. Relat. Res., 5:177-181 (1984)). Animal models are used in the art for testing the effect of the pharmaceutical compositions and methods on, for example, parameters of bone loss, bone resorption, bone formation, bone strength, or bone mineralization that mimic conditions of human disease such as osteoporosis and osteopenia. Examples of such models include the ovariectomized rat model (Kalu, Bone and Mineral, 15:175-192 (1991); Frost and Jee, Bone and Mineral, 18:227-236 (1992); and Jee and Yao, J. Musculoskel. Neuron. Interact., 1:193-207 (2001)). The methods for measuring heterodimeric antibody activity described herein also may be used to determine the efficacy of other sclerostin inhibitors.

[0164] In humans, bone mineral density can be determined clinically using dual x-ray absorptiometry (DXA) of, for example, the hip and spine. Other techniques include quantitative computed tomography (QCT), ultrasonography, single-energy x-ray absorptiometry (SXA), and radiographic absorptiometry. Common central skeletal sites for measurement include the spine and hip; peripheral sites include the forearm, finger, wrist and heel. Except for ultrasonography, the American Medical Association notes that BMD techniques typically involve the use of x-rays and are based on the principle that attenuation of the radiation depends on thickness and composition of the tissues in the radiation path. All techniques involve the comparison of results to a normative database.

[0165] Alternatively, a physiological response to one or more sclerostin binding agents can be gauged by monitoring bone marker levels. Bone markers are products created during the bone remodeling process and are released by bone, osteoblasts, and/or osteoclasts. Fluctuations in bone resorption and/or bone formation “marker” levels imply changes in bone remodeling/modeling. The International Osteoporosis Foundation (IOF) recommends using bone markers to monitor bone density therapies (see, e.g., Delmas et al., Osteoporos Int., Suppl. 6:S2-17 (2000), incorporated herein by reference). Markers indicative of bone resorption (or osteoclast activity) include, for example, C-telopeptide (e.g., C-terminal telopeptide of type 1 collagen (CTX) or serum cross-linked C-telopeptide), N-telopeptide (N-terminal telopeptide of type 1 collagen (NTX)), deoxypyridinoline (DPD), pyridinoline, urinary hydroxyproline, galactosyl hydroxylysine, and tartrate-resistant acid phosphatase (e.g., serum tartrate-resistant acid phosphatase isoform 5b). Bone formation/mineralization markers include, but are not limited to, bone-specific alkaline phosphatase (BSAP), peptides released from N- and C-terminal extension of type I procollagen (P1NP, PICP), and osteocalcin (OstCa). Several kits are commercially-available to detect and quantify markers in clinical samples, such as urine and blood.

[0166] Combination Therapy

[0167] Treatment of a pathology by combining two or more agents that target the same pathogen or biochemical pathway or biological process sometimes results in greater efficacy and diminished side effects relative to the use of a therapeutically relevant dose of each agent alone. In some cases, the efficacy of the drug combination is additive (the efficacy of the combination is approximately equal to the sum of the effects of each drug alone), but in other cases the effect is synergistic (the efficacy of the combination is greater than the sum of the effects of each drug given alone). As used herein, the term “combination therapy” means that two or more agents are delivered in a simultaneous manner, e.g., concurrently, or wherein one of the agents is administered first, followed by the second agent, e.g., sequentially.

[0168] In some embodiments, the heterodimeric antibody is administered along with a standard of care therapeutic for the treatment of decreased bone mineral density (i.e., the heterodimeric antibody and standard of care therapeutic are part of the same treatment plan). As used herein, the term “standard of care” refers to a treatment that is generally accepted by clinicians for a certain type of patient diagnosed with a type of illness. In some embodiments, the heterodimeric antibody is administered along with a second bone-enhancing agent useful for the treatment of decreased bone mineral density or bone defect. In some embodiments, the bone-enhancing agent is selected from the group consisting of an anti-resorptive agent, a bone-forming agent (i.e., anabolic), an estrogen receptor modulator (including, but not limited to, raloxifene, bazedoxifene and lasofoxifene) and a drug that has an inhibitory effect on osteoclasts. In some embodiments, the second bone-enhancing agent is selected from the group consisting of a bisphosphonate (including, but not limited to, alendronate sodium (FOSAMAX®), risedronate, ibandronate sodium (BONIVA®) and zoledronic acid (RECLAST®)); an estrogen or estrogen analogue; an anti-RANK ligand (RANKL) inhibitor, such as an anti-RANKL antibody (e.g., PROLIA®); vitamin D, or a vitamin D derivative or mimic thereof; a calcium source, a cathepsin-K (cat-K) inhibitor (e.g. odanacatib), Tibolone, calcitonin or a calcitriol; and hormone replacement therapy. In some embodiments, the second bone-enhancing agent includes, but is not limited to, parathyroid hormone (PTH) or a peptide fragment thereof, PTH-related protein (PTHrp), bone morphogenetic protein, osteogenin, NaF, a PGE2 agonist, a statin, strontium ranelate, a sclerostin inhibitor (e.g., an anti-sclerostin antibody described in, for example, U.S. Pat. No. 7,592,429 or 7,872,106), and an anti-DKK1 antibody or inhibitor. In some embodiments, the second bone-enhancing agent is Forteo® (Teriparatide), Preotact®, or Protelos®.

[0169] In some embodiments, the combination therapy employing a heterodimeric antibody described herein may precede or follow administration of additional therapeutic(s) (e.g., second bone-enhancing agent) by intervals ranging from minutes to weeks to months. For example, separate modalities are administered within about 24 hours of each other, e.g., within about 6-12 hours of each other, or within about 1-2 hours of each other, or within about 10-30 minutes of each other. In some situations, it may be desirable to extend the time period for treatment significantly, where several days (2, 3, 4, 5, 6 or 7 days) to several weeks (1, 2, 3, 4, 5, 6, 7 or 8 weeks) lapse between the respective administrations of different modalities. Repeated treatments with one or both agents/therapies of the combination therapy is specifically contemplated.

[0170] Maintenance Therapeutic Regimen

[0171] Also contemplated is the use of a second bone-enhancing agent and/or heterodimeric antibody described herein in a maintenance regimen to, e.g., prevent or slow the loss of bone mineral density. In this regard, a method or use described herein optionally comprises administering one or more amounts of a second bone-enhancing agent effective to maintain bone mineral density for a maintenance period of about 1 week to about 5 years after the treatment period with the heterodimeric antibody has ended. For example, in some embodiments, a method or use described herein comprises the administration of a second bone-enhancing agent to the subject for a maintenance period of about at least about 1 week, 2 weeks, 3 weeks, 4 weeks, 5 weeks, 6 weeks, 7 weeks, 8 weeks, 9 weeks, 10 weeks, 11 weeks, 12 weeks, 3 months, 13 weeks, 14 weeks, 15 weeks, 16 weeks, 4 months, 17 weeks, 18 weeks, 19 weeks, 20 weeks, 5 months, 21 weeks, 22 weeks, 23 weeks, 24 weeks, 6 months, 25 weeks, 26 weeks, 27 weeks 28 weeks, 7 months, 29 weeks, 30 weeks, 31 weeks or longer (e.g., 8 months, 9 months, 10 months, 11 months, 1 year, 15 months, 18 months, 2 years, 3 years, 4 years, 5 years or longer (e.g., over the lifetime of the subject). In some embodiments, the maintenance period is about 6-12 weeks. In some embodiments, the maintenance period is about 4-12 weeks, or about 1-3 months. In some embodiments, the maintenance period is about 12-20 weeks, or about 3-5 months. In some embodiments, the maintenance period is about 20-32 weeks, or about 5-8 months. In some embodiments, the maintenance period is about 24-36 weeks, or about 6-9 months. In some embodiments, the maintenance period is about 1 year, about 2 years, about 3 years, about 4 years, about 5 years or longer. “Maintaining” bone mineral density includes maintaining similar levels of bone mineral density parameters experienced in the subject that received the heterodimeric antibody treatment.

[0172] Similarly, a method or use described herein optionally comprises subsequently administering one or more amounts of a heterodimeric antibody effective to maintain bone mineral density for a maintenance period of at least about least about 1 week, 2 weeks, 3 weeks, 4 weeks, 5 weeks, 6 weeks, 7 weeks, 8 weeks, 9 weeks, 10 weeks, 11 weeks, 12 weeks, 3 months, 13 weeks, 14 weeks, 15 weeks, 16 weeks, 4 months, 17 weeks, 18 weeks, 19 weeks, 20 weeks, 5 months, 21 weeks, 22 weeks, 23 weeks, 24 weeks, 6 months, 1 year, 2 years, 3 years, 4 years, 5 years or longer (e.g., over the lifetime of the subject) after the treatment period has ended. In some embodiments, the maintenance period is about 6-12 weeks. In some embodiments, the maintenance period is about 4-12 weeks, or about 1-3 months. In some embodiments, the maintenance period is about 12-20 weeks, or about 3-5 months. In some embodiments, the maintenance period is about 20-32 weeks, or about 5-8 months. In some embodiments, the maintenance period is about 24-36 weeks, or about 6-9 months. In some embodiments, the maintenance period is about 1 year, about 2 year, about 3 years, about 4 years, about 5 years or longer.

[0173] Pharmaceutical Compositions

[0174] In some embodiments, the invention provides a pharmaceutical composition comprising a therapeutically effective amount of one or a plurality of the antigen binding proteins of the invention together with a pharmaceutically effective diluents, carrier, solubilizer, emulsifier, preservative, and/or adjuvant. Pharmaceutical compositions of the invention include, but are not limited to, liquid, frozen, and lyophilized compositions.

[0175] Preferably, formulation materials are nontoxic to recipients at the dosages and concentrations employed. In specific embodiments, pharmaceutical compositions comprising a therapeutically effective amount of heterodimeric antibody or fragment are provided.

[0176] In some embodiments, the pharmaceutical composition may contain formulation materials for modifying, maintaining or preserving, for example, the pH, osmolarity, viscosity, clarity, color, isotonicity, odor, sterility, stability, rate of dissolution or release, adsorption or penetration of the composition. In such embodiments, suitable formulation materials include, but are not limited to, amino acids (such as glycine, glutamine, asparagine, arginine, proline, or lysine); antimicrobials; antioxidants (such as ascorbic acid, sodium sulfite or sodium hydrogen-sulfite); buffers (such as borate, bicarbonate, Tris-HCl, citrates, phosphates or other organic acids); bulking agents (such as mannitol or glycine); chelating agents (such as ethylenediamine tetraacetic acid (EDTA)); complexing agents (such as caffeine, polyvinylpyrrolidone, beta-cyclodextrin or hydroxypropyl-beta-cyclodextrin); fillers; monosaccharides; disaccharides; and other carbohydrates (such as glucose, mannose or dextrins); proteins (such as serum albumin, gelatin or immunoglobulins); coloring, flavoring and diluting agents; emulsifying agents; hydrophilic polymers (such as polyvinylpyrrolidone); low molecular weight polypeptides; salt-forming counterions (such as sodium); preservatives (such as benzalkonium chloride, benzoic acid, salicylic acid, thimerosal, phenethyl alcohol, methylparaben, propylparaben, chlorhexidine, sorbic acid or hydrogen peroxide); solvents (such as glycerin, propylene glycol or polyethylene glycol); sugar alcohols (such as mannitol or sorbitol); suspending agents; surfactants or wetting agents (such as pluronics, PEG, sorbitan esters, polysorbates such as polysorbate 20, polysorbate, triton, tromethamine, lecithin, cholesterol, tyloxapal); stability enhancing agents (such as sucrose or sorbitol); tonicity enhancing agents (such as alkali metal halides, preferably sodium or potassium chloride, mannitol sorbitol); delivery vehicles; diluents; excipients and/or pharmaceutical adjuvants. See, REMINGTON'S PHARMACEUTICAL SCIENCES, 18″ Edition, (A. R. Genrmo, ed.), 1990, Mack Publishing Company.

[0177] In some embodiments, the optimal pharmaceutical composition will be determined by one skilled in the art depending upon, for example, the intended route of administration, delivery format and desired dosage. See, for example, REMINGTON'S PHARMACEUTICAL SCIENCES, supra. In certain embodiments, such compositions may influence the physical state, stability, rate of in vivo release and rate of in vivo clearance of the heterodimeric antibody or fragment. In certain embodiments, the primary vehicle or carrier in a pharmaceutical composition may be either aqueous or non-aqueous in nature. For example, a suitable vehicle or carrier may be water for injection, physiological saline solution or artificial cerebrospinal fluid, possibly supplemented with other materials common in compositions for parenteral administration. Neutral buffered saline or saline mixed with serum albumin are further exemplary vehicles. In specific embodiments, pharmaceutical compositions comprise Tris buffer of about pH 7.0-8.5, or acetate buffer of about pH 4.0-5.5, and may further include sorbitol or a suitable substitute therefor. In certain embodiments of the invention, the composition may be prepared for storage by mixing the selected composition having the desired degree of purity with optional formulation agents (REMINGTON'S PHARMACEUTICAL SCIENCES, supra) in the form of a lyophilized cake or an aqueous solution. Further, in some embodiments, the heterodimeric antibody or fragment may be formulated as a lyophilizate using appropriate excipients such as sucrose.

[0178] The pharmaceutical compositions of the invention can be selected for parenteral delivery. Alternatively, the compositions may be selected for inhalation or for delivery through the digestive tract, such as orally. Preparation of such pharmaceutically acceptable compositions is within the skill of the art. The formulation components are present preferably in concentrations that are acceptable to the site of administration. In certain embodiments, buffers are used to maintain the composition at physiological pH or at a slightly lower pH, typically within a pH range of from about 5 to about 8.

[0179] When parenteral administration is contemplated, the therapeutic compositions for use in this invention may be provided in the form of a pyrogen-free, parenterally acceptable aqueous solution comprising the desired heterodimeric antibody or fragment in a pharmaceutically acceptable vehicle. A particularly suitable vehicle for parenteral injection is sterile distilled water in which the heterodimeric antibody or fragment is formulated as a sterile, isotonic solution, properly preserved. In certain embodiments, the preparation involves the formulation of the desired molecule with an agent, such as injectable microspheres, bio-erodible particles, polymeric compounds (such as polylactic acid or polyglycolic acid), beads or liposomes, that may provide controlled or sustained release of the product which can be delivered via depot injection. In certain embodiments, hyaluronic acid may also be used, having the effect of promoting sustained duration in the circulation. In certain embodiments, implantable drug delivery devices may be used to introduce the desired heterodimeric antibody or fragment.

[0180] Pharmaceutical compositions of the invention can be formulated for inhalation. In these embodiments, heterodimeric antibody or fragment is advantageously formulated as a dry, inhalable powder. In specific embodiments, heterodimeric antibody or fragment inhalation solutions may also be formulated with a propellant for aerosol delivery. In certain embodiments, solutions may be nebulized. Pulmonary administration and formulation methods therefore are further described in International Patent Application No. PCT/US94/001875, which is incorporated by reference and describes pulmonary delivery of chemically modified proteins.

[0181] It is also contemplated that formulations can be administered orally. Heterodimeric antibody or fragments that are administered in this fashion can be formulated with or without carriers customarily used in the compounding of solid dosage forms such as tablets and capsules. In certain embodiments, a capsule may be designed to release the active portion of the formulation at the point in the gastrointestinal tract when bioavailability is maximized and pre-systemic degradation is minimized. Additional agents can be included to facilitate absorption of the heterodimeric antibody or fragment. Diluents, flavorings, low melting point waxes, vegetable oils, lubricants, suspending agents, tablet disintegrating agents, and binders may also be employed.

[0182] Additional pharmaceutical compositions will be evident to those skilled in the art, including formulations involving antigen binding proteins in sustained- or controlled-delivery formulations. Techniques for formulating a variety of other sustained- or controlled-delivery means, such as liposome carriers, bio-erodible microparticles or porous beads and depot injections, are also known to those skilled in the art. See, for example, International Patent Application No. PCT/US93/00829, which is incorporated by reference and describes controlled release of porous polymeric microparticles for delivery of pharmaceutical compositions. Sustained-release preparations may include semipermeable polymer matrices in the form of shaped articles, e.g., films, or microcapsules. Sustained release matrices may include polyesters, hydrogels, polylactides (as disclosed in U.S. Pat. No. 3,773,919 and European Patent Application Publication No. EP058481, each of which is incorporated by reference), copolymers of L-glutamic acid and gamma ethyl-L-glutamate (Sidman et al., 1983, Biopolymers 2:547-556), poly (2-hydroxyethyl-methacrylate) (Langer et al., 1981, J. Biomed. Mater. Res. 15:167-277 and Langer, 1982, Chem. Tech. 12:98-105), ethylene vinyl acetate (Langer et al., 1981, supra) or poly-D(−)-3-hydroxybutyric acid (European Patent Application Publication No. EP133988). Sustained release compositions may also include liposomes that can be prepared by any of several methods known in the art. See, e.g., Eppstein et al., 1985, Proc. Natl. Acad. Sci. U.S.A. 82:3688-3692; European Patent Application Publication Nos. EP036676; EP088046 and EP143949, incorporated by reference.

[0183] Pharmaceutical compositions used for in vivo administration are typically provided as sterile preparations. Sterilization can be accomplished by filtration through sterile filtration membranes. When the composition is lyophilized, sterilization using this method may be conducted either prior to or following lyophilization and reconstitution. Compositions for parenteral administration can be stored in lyophilized form or in a solution. Parenteral compositions generally are placed into a container having a sterile access port, for example, an intravenous solution bag or vial having a stopper pierceable by a hypodermic injection needle.

[0184] Aspects of the invention includes self-buffering heterodimeric antibody or fragment formulations, which can be used as pharmaceutical compositions, as described in international patent application WO 2006/138181A2 (PCT/US2006/022599), which is incorporated by reference in its entirety herein.

[0185] As discussed above, certain embodiments provide heterodimeric antibody or fragment compositions, particularly pharmaceutical heterodimeric antibody or fragment compositions, that comprise, in addition to the heterodimeric antibody or fragment, one or more excipients such as those illustratively described in this section and elsewhere herein. Excipients can be used in the invention in this regard for a wide variety of purposes, such as adjusting physical, chemical, or biological properties of formulations, such as adjustment of viscosity, and or processes of the invention to improve effectiveness and or to stabilize such formulations and processes against degradation and spoilage due to, for instance, stresses that occur during manufacturing, shipping, storage, pre-use preparation, administration, and thereafter.

[0186] A variety of expositions are available on protein stabilization and formulation materials and methods useful in this regard, such as Arakawa et al., “Solvent interactions in pharmaceutical formulations,” Pharm Res. 8(3): 285-91 (1991); Kendrick et al., “Physical stabilization of proteins in aqueous solution,” in: RATIONAL DESIGN OF STABLE PROTEIN FORMULATIONS: THEORY AND PRACTICE, Carpenter and Manning, eds. Pharmaceutical Biotechnology. 13: 61-84 (2002), and Randolph et al., “Surfactant-protein interactions,” Pharm Biotechnol. 13: 159-75 (2002), each of which is herein incorporated by reference in its entirety, particularly in parts pertinent to excipients and processes of the same for self-buffering protein formulations in accordance with the current invention, especially as to protein pharmaceutical products and processes for veterinary and/or human medical uses.

[0187] Salts may be used in accordance with certain embodiments of the invention to, for example, adjust the ionic strength and/or the isotonicity of a formulation and/or to improve the solubility and/or physical stability of a protein or other ingredient of a composition in accordance with the invention.

[0188] As is well known, ions can stabilize the native state of proteins by binding to charged residues on the protein's surface and by shielding charged and polar groups in the protein and reducing the strength of their electrostatic interactions, attractive, and repulsive interactions. Ions also can stabilize the denatured state of a protein by binding to, in particular, the denatured peptide linkages (—CONH) of the protein. Furthermore, ionic interaction with charged and polar groups in a protein also can reduce intermolecular electrostatic interactions and, thereby, prevent or reduce protein aggregation and insolubility.

[0189] Ionic species differ significantly in their effects on proteins. A number of categorical rankings of ions and their effects on proteins have been developed that can be used in formulating pharmaceutical compositions in accordance with the invention. One example is the Hofmeister series, which ranks ionic and polar non-ionic solutes by their effect on the conformational stability of proteins in solution. Stabilizing solutes are referred to as “kosmotropic.” Destabilizing solutes are referred to as “chaotropic.” Kosmotropes commonly are used at high concentrations (e.g., >1 molar ammonium sulfate) to precipitate proteins from solution (“salting-out”). Chaotropes commonly are used to denture and/or to solubilize proteins (“salting-in”). The relative effectiveness of ions to “salt-in” and “salt-out” defines their position in the Hofmeister series.

[0190] Free amino acids can be used in heterodimeric antibody or fragment formulations in accordance with various embodiments of the invention as bulking agents, stabilizers, and antioxidants, as well as other standard uses. Lysine, proline, serine, and alanine can be used for stabilizing proteins in a formulation. Glycine is useful in lyophilization to ensure correct cake structure and properties. Arginine may be useful to inhibit protein aggregation, in both liquid and lyophilized formulations. Methionine is useful as an antioxidant.

[0191] Polyols include sugars, e.g., mannitol, sucrose, and sorbitol and polyhydric alcohols such as, for instance, glycerol and propylene glycol, and, for purposes of discussion herein, polyethylene glycol (PEG) and related substances. Polyols are kosmotropic. They are useful stabilizing agents in both liquid and lyophilized formulations to protect proteins from physical and chemical degradation processes. Polyols also are useful for adjusting the tonicity of formulations.

[0192] Among polyols useful in select embodiments of the invention is mannitol, commonly used to ensure structural stability of the cake in lyophilized formulations. It ensures structural stability to the cake. It is generally used with a lyoprotectant, e.g., sucrose. Sorbitol and sucrose are among preferred agents for adjusting tonicity and as stabilizers to protect against freeze-thaw stresses during transport or the preparation of bulks during the manufacturing process. Reducing sugars (which contain free aldehyde or ketone groups), such as glucose and lactose, can glycate surface lysine and arginine residues. Therefore, they generally are not among preferred polyols for use in accordance with the invention. In addition, sugars that form such reactive species, such as sucrose, which is hydrolyzed to fructose and glucose under acidic conditions, and consequently engenders glycation, also is not among preferred polyols of the invention in this regard. PEG is useful to stabilize proteins and as a cryoprotectant and can be used in the invention in this regard.

[0193] Embodiments of the heterodimeric antibody or fragment formulations further comprise surfactants. Protein molecules may be susceptible to adsorption on surfaces and to denaturation and consequent aggregation at air-liquid, solid-liquid, and liquid-liquid interfaces. These effects generally scale inversely with protein concentration. These deleterious interactions generally scale inversely with protein concentration and typically are exacerbated by physical agitation, such as that generated during the shipping and handling of a product.

[0194] Surfactants routinely are used to prevent, minimize, or reduce surface adsorption. Useful surfactants in the invention in this regard include polysorbate 20, polysorbate 80, other fatty acid esters of sorbitan polyethoxylates, and poloxamer 188.

[0195] Surfactants also are commonly used to control protein conformational stability. The use of surfactants in this regard is protein-specific since, any given surfactant typically will stabilize some proteins and destabilize others.

[0196] Polysorbates are susceptible to oxidative degradation and often, as supplied, contain sufficient quantities of peroxides to cause oxidation of protein residue side-chains, especially methionine. Consequently, polysorbates should be used carefully, and when used, should be employed at their lowest effective concentration. In this regard, polysorbates exemplify the general rule that excipients should be used in their lowest effective concentrations.

[0197] Embodiments of heterodimeric antibody or fragment formulations further comprise one or more antioxidants. To some extent deleterious oxidation of proteins can be prevented in pharmaceutical formulations by maintaining proper levels of ambient oxygen and temperature and by avoiding exposure to light. Antioxidant excipients can be used as well to prevent oxidative degradation of proteins. Among useful antioxidants in this regard are reducing agents, oxygen/free-radical scavengers, and chelating agents. Antioxidants for use in therapeutic protein formulations in accordance with the invention preferably are water-soluble and maintain their activity throughout the shelf life of a product. EDTA is a preferred antioxidant in accordance with the invention in this regard.

[0198] Formulations in accordance with the invention may include metal ions that are protein co-factors and that are necessary to form protein coordination complexes, such as zinc necessary to form certain insulin suspensions. Metal ions also can inhibit some processes that degrade proteins. However, metal ions also catalyze physical and chemical processes that degrade proteins.

[0199] Magnesium ions (10-120 mM) can be used to inhibit isomerization of aspartic acid to isoaspartic acid. Ca⁺² ions (up to 100 mM) can increase the stability of human deoxyribonuclease. Mg⁺², Mn⁺², and Zn⁺², however, can destabilize rhDNase. Similarly, Ca⁺² and Sr⁺² can stabilize Factor VIII, it can be destabilized by Mg⁺², Mn⁺² and Zn⁺², Cu⁺² and Fe⁺², and its aggregation can be increased by Al+3 ions.

[0200] Embodiments of the heterodimeric antibody or fragment formulations further comprise one or more preservatives. Preservatives are necessary when developing multi-dose parenteral formulations that involve more than one extraction from the same container. Their primary function is to inhibit microbial growth and ensure product sterility throughout the shelf-life or term of use of the drug product. Commonly used preservatives include benzyl alcohol, phenol and m-cresol. Although preservatives have a long history of use with small-molecule parenterals, the development of protein formulations that includes preservatives can be challenging. Preservatives almost always have a destabilizing effect (aggregation) on proteins, and this has become a major factor in limiting their use in multi-dose protein formulations. To date, most protein drugs have been formulated for single-use only. However, when multi-dose formulations are possible, they have the added advantage of enabling patient convenience, and increased marketability. A good example is that of human growth hormone (hGH) where the development of preserved formulations has led to commercialization of more convenient, multi-use injection pen presentations. At least four such pen devices containing preserved formulations of hGH are currently available on the market. Norditropin (liquid, Novo Nordisk), Nutropin AQ (liquid, Genentech) & Genotropin (lyophilized—dual chamber cartridge, Pharmacia & Upjohn) contain phenol while Somatrope (Eli Lilly) is formulated with m-cresol.

[0201] Several aspects need to be considered during the formulation and development of preserved dosage forms. The effective preservative concentration in the drug product must be optimized. This requires testing a given preservative in the dosage form with concentration ranges that confer anti-microbial effectiveness without compromising protein stability.

[0202] As might be expected, development of liquid formulations containing preservatives are more challenging than lyophilized formulations. Freeze-dried products can be lyophilized without the preservative and reconstituted with a preservative containing diluent at the time of use. This shortens the time for which a preservative is in contact with the protein, significantly minimizing the associated stability risks. With liquid formulations, preservative effectiveness and stability should be maintained over the entire product shelf-life (about 18 to 24 months). An important point to note is that preservative effectiveness should be demonstrated in the final formulation containing the active drug and all excipient components.

[0203] Heterodimeric antibody or fragment formulations generally will be designed for specific routes and methods of administration, for specific administration dosages and frequencies of administration, for specific treatments of specific diseases, with ranges of bio-availability and persistence, among other things. Formulations thus may be designed in accordance with the invention for delivery by any suitable route, including but not limited to orally, aurally, opthalmically, rectally, and vaginally, and by parenteral routes, including intravenous and intraarterial injection, intramuscular injection, and subcutaneous injection.

[0204] Once the pharmaceutical composition has been formulated, it may be stored in sterile vials as a solution, suspension, gel, emulsion, solid, crystal, or as a dehydrated or lyophilized powder. Such formulations may be stored either in a ready-to-use form or in a form (e.g., lyophilized) that is reconstituted prior to administration. The invention also provides kits for producing a single-dose administration unit. The kits of the invention may each contain both a first container having a dried protein and a second container having an aqueous formulation. In certain embodiments of this invention, kits containing single and multi-chambered pre-filled syringes (e.g., liquid syringes and lyosyringes) are provided.

[0205] The therapeutically effective amount of an antigen binding protein-containing pharmaceutical composition to be employed will depend, for example, upon the therapeutic context and objectives. One skilled in the art will appreciate that the appropriate dosage levels for treatment will vary depending, in part, upon the molecule delivered, the indication(s) for which the antigen binding protein is being used, the route of administration, and the size (body weight, body surface or organ size) and/or condition (the age and general health) of the patient. In certain embodiments, the clinicians may titer the dosage and modify the route of administration to obtain the optimal therapeutic effect.

[0206] Stability

[0207] The terms “stability” and “stable” as used herein in the context of a composition comprising a heterodimeric antibody (or antigen binding fragment thereof) refer to the resistance of the heterodimeric antibody (or antigen binding fragment thereof) in the composition to aggregation, degradation or fragmentation under given manufacture, preparation, transportation and/or storage conditions. Antibody formulations comprising a high degree of stability demonstrate enhanced reliability and safety and, as such, are advantageous for clinical use.

[0208] Antibody stability in a composition is optionally assessed by examining a desired parameter of the antibody in the composition (e.g., aggregation, degradation of heavy and/or light chains, chemical modification, etc.) over time. In this regard, a parameter is typically examined at an initial time point (T0) and an assessment time point (T1), optionally while exposing the antibody or fragment thereof to any of a number of environmental conditions, and compared. An initial time point can be, for instance, the time that the antibody or fragment thereof is first formulated in a composition or first examined for quality (i.e., examined to determine whether the antibody composition meets regulatory or manufacturing specifications with respect to aggregation or degradation). An initial time point also can be the time at which the antibody or antibody fragment is reformulated in a composition (e.g., reformulated at a higher or lower concentration compared to an initial preparation). An assessment time point is, in various embodiments, about 1 week (or about 2 weeks, or about 3 weeks, or about 4 weeks, or about 5 weeks, or about 6 weeks, or about 7 weeks, or about 8 weeks, or about 10 weeks, or about 3 months, or about 6 months or about 1 year) after the initial time point. The desired parameter (e.g., aggregation or degradation) of the antibody or fragment thereof in the composition can be assessed under a variety of storage conditions, such as temperatures of −30° C., 4° C., 20° C. or 40° C., shaking, pH, storage in different container materials (e.g., glass vials, pre-filled syringes, etc.), and the like.

[0209] Exemplary methods for determining the degree of aggregation, and/or types and/or sizes of aggregates present in a composition comprising the heterodimeric antibody include, but are not limited to, size exclusion chromatography (SEC), high performance size exclusion chromatography (HPSEC), static light scattering (SLS), Fourier Transform Infrared Spectroscopy (FTIR), circular dichroism (CD), urea-induced protein unfolding techniques, intrinsic tryptophan fluorescence, differential scanning calorimetry, and 1-anilino-8-naphthalenesulfonic acid (ANS) protein binding techniques. Size exclusion chromatography (SEC) may be performed to separate molecules on the basis of their size, by passing the molecules over a column packed with the appropriate resin, the larger molecules (e.g. aggregates) will elute before smaller molecules (e.g. monomers). The molecules are generally detected by UV absorbance at 280 nm and may be collected for further characterization. High pressure liquid chromatographic columns are often utilized for SEC analysis (HP-SEC). Alternatively, analytical ultracentrifugation (AUC) may be utilized. AUC is an orthogonal technique which determines the sedimentation coefficients (reported in Svedberg. S) of macromolecules in a liquid sample Like SEC, AUC is capable of separating and detecting antibody fragments/aggregates from monomers and is further able to provide information on molecular mass. Antibody or antibody fragment aggregation in a composition may also be characterized by particle counter analysis using a coulter counter or by turbidity measurements using a turbidimeter. Turbidity is a measure of the amount by which the particles in a solution scatter light and, thus, may be used as a general indicator of protein aggregation. In addition, non-reducing polyacrylamide gel electrophoresis (PAGE) or capillary gel electrophoresis (CGE) may be used to characterize the aggregation and/or fragmentation state of antibodies or antibody fragments in a composition.

[0210] Exemplary methods for determining antibody degradation include, but are not limited to, size-exclusion chromatography (SEC), sodium dodecyl sulfate-polyacrylamide gel electrophoresis (SDS-PAGE) and capillary electrophoresis with SDS (CE-SDS) and reversed phase HPLC with in-line MS detection.

[0211] In various embodiments, less than 5% of the heterodimeric antibody or antibody fragment described herein in the composition is in aggregate form under conditions of interest. For instance, less than 4%, or less than 3%, or less than 2%, or less than 1% of the heterodimeric antibody or fragment thereof in the composition is in aggregate form after storage at −30° C., 4° C., 20° C. or 40° C. for a period of about 1 week (or about 2 weeks, or about 3 weeks, or about 4 weeks, or about 5 weeks, or about 6 weeks, or about 7 weeks, or about 8 weeks, or about 10 weeks, or about 3 months, or about 6 months or about 1 year). In some embodiments, less than 5% (or less than 4% or less than 3% or less than 2% or less than 1% or less) of the heterodimeric antibody of antibody fragment described herein in the composition is in aggregate form after storage for two weeks at about 4° C.

[0212] For example at least 85% (or at least 90%, or at least 91%, or at least 92%, or at least 93%, or at least 94%, or at least 95%, or at least 96%, or at least 97%, or at least 98%, or at least 99%) of antibody or fragment thereof in a composition optionally is present in non-aggregate (i.e., monomeric)form after storage at −30° C., 4° C., 20° C. or 40° C. for a period of about 1 week (or about 2 weeks, or about 3 weeks, or about 4 weeks, or about 5 weeks, or about 6 weeks, or about 7 weeks, or about 8 weeks, or about 10 weeks, or about 3 months, or about 6 months or about 1 year). In some embodiments, at least 85% (or at least 90%, or at least 91%, or at least 92%, or at least 93%, or at least 94%, or at least 95%, or at least 96%, or at least 97%, or at least 98%, or at least 99% or more) of the antibody or fragment thereof is present in the composition in non-aggregate form after two weeks of storage at about 4° C. In some embodiments, at least 99% of the antibody is present in the composition in non-aggregate form after storage for two weeks at about 4° C. for two weeks and/or at least 95% of antibody present is in the compositions is in non-aggregate form after storage for two weeks at 40° C.

[0213] In various embodiments, less than 5% of the heterodimeric antibody or antibody fragment described herein in the composition is degraded. For instance, less than 4%, or less than 3%, or less than 2%, or less than 1% or less of the heterodimeric antibody or fragment thereof in the composition is degraded under conditions of interest. For example, optionally at least 85% (or at least 90%, or at least 91%, or at least 92%, or at least 93%, or at least 94%, or at least 95%, or at least 96%, or at least 97%, or at least 98%, or at least 99%) of the antibody or fragment is intact (i.e., not degraded) in a composition stored at about −30° C., about 4° C., about 20° C. or about 40° C. for a period of about 1 week (or about 2 weeks, or about 3 weeks, or about 4 weeks, or about 5 weeks, or about 6 weeks, or about 7 weeks, or about 8 weeks, or about 10 weeks, or about 3 months, or about 6 months or about 1 year). In some aspects, at least 85% (or at least 90%, or at least 91%, or at least 92%, or at least 93%, or at least 94%, or at least 95%, or at least 96%, or at least 97%, or at least 98%, or at least 99% or more) of the antibody or fragment thereof is intact (i.e., non-degraded) after storage in a composition at about 4° C. for a period of two weeks. In some embodiments, at least 99% of the antibody or fragment remains intact when stored in a composition at about 4° C. for two weeks and/or at least 95% remains intact when stored in a composition at about 40° C. for two weeks.

[0214] Functional or activity stability of the heterodimeric antibody (or antigen binding fragment there) in a composition also is contemplated herein. Assays for detecting and/or quantifying, e.g., antibody binding to a target, sclerostin neutralization, and DKK-1 neutralization are known in the art and are described herein in Examples 4-6. Optionally, the antibody or fragment thereof demonstrates about 50-100% activity under conditions of interest compared to the activity of the antibody or fragment thereof at the initial time point. For example, the antibody or fragment thereof retains a level of activity of between about 60-90% or 70-80% compared to the activity the initial time point. Accordingly, functional stability of the antibody or fragment thereof includes retention of activity of at least about 50%, 55%, 60%, 65%, 70%, 75%, 80%, 85%, 90%, 95% or 100% and can include activity measurements greater than 100% such as 105%, 110%, 115%, 120%, 125% or 150% or more compared to the activity at the initial time point.

[0215] Viscosity

[0216] In some embodiments, the viscosity of a composition comprising one or more of the heterodimeric antibodies described herein is determined. The term “viscosity” as used herein refers to “absolute viscosity.” Absolute viscosity, sometimes called dynamic or simple viscosity, is the product of kinematic viscosity and fluid density (Absolute Viscosity=Kinematic Viscosity×Density). The dimension of kinematic viscosity is L²/T where L is a length and T is a time. Commonly, kinematic viscosity is expressed in centistokes (cSt). The SI unit of kinematic viscosity is mm²/s, which is 1 cSt. Absolute viscosity is expressed in units of centipoise (cP). The SI unit of absolute viscosity is the millipascal-second (mPa-s), where 1 cP=1 mPa-s.

[0217] The viscosity of a composition can be measured hours (e.g., 1-23 hours), days (e.g., 1-10 days), weeks (e.g., 1-5 weeks), months (e.g., 1-12 months), or years (e.g., 1-2 years, 1-3 years) after the addition of the antibody to the composition. Viscosity measurements may be made at a storage or administration temperature, e.g. 2-8° C. or 25° C. (room temperature). In some embodiments, absolute viscosity of the liquid or reconstituted liquid composition at the storage and/or administration temperature is 15 cP or less, or 14, 13, 12, 11, 10, 9, 8, 7, 6, 5, or 4 cP or less. In some embodiments, absolute viscosity of the liquid or reconstituted liquid composition is 6 cP or less.

[0218] In some embodiments, the viscosity of the antibody composition is measured prior to and after the addition of heterodimeric antibody. Methods of measuring viscosity are well known in the art and include, for example, using a capillary viscometer, or a cone-plate rheometer. Any method may be used provided the same method is used to compare the test and reference formulations.

[0219] Kits

[0220] A pharmaceutical composition comprising one or more heterodimeric antibodies described herein may be placed within containers (e.g., vials or syringes), along with packaging material that provides instructions regarding the use of such pharmaceutical compositions. Generally, such instructions will include a tangible expression describing the heterodimeric antibody concentration, as well as within certain embodiments, relative amounts of excipient ingredients or diluents (e.g., water, saline or PBS) that may be necessary to reconstitute the pharmaceutical composition.

### Additional Embodiments

[0221] Also contemplated are the following embodiments provided in the following numbered paragraphs:

[0222] 1. An isolated antibody heavy chain variable region comprising an amino acid substitution within the framework region at AHo position 51 or 141, wherein the substitution introduces a positive- or negative-charged amino acid into the heavy chain variable region framework at said position.

[0223] 2. The isolated antibody heavy chain variable region of paragraph 1, wherein AHo position 51 or AHo position 141 is substituted for a positive charged amino acid.

[0224] 3. The isolated antibody heavy chain variable region of paragraph 2, further comprising a substitution at AHo position 46 for a positive charged amino acid.

[0225] 4. The isolated antibody heavy chain variable region of paragraph 2 or paragraph 3, wherein AHo position 51 is substituted for a positive charged amino acid.

[0226] 5. The isolated antibody heavy chain variable region of paragraph 1, 2, or 3, wherein AHo position 141 is substituted for a positive charge amino acid.

[0227] 6. The isolated antibody heavy chain variable region of paragraph 3, wherein AHo position 46 and AHo position 141 are substituted for a positive charged amino acid.

[0228] 7. The isolated antibody heavy chain of any of paragraphs 2-6, wherein the positive charged amino acid is lysine.

[0229] 8. The isolated antibody heavy chain variable region of paragraph 1, wherein AHo position 51 or AHo position 141 is substituted for a negative charged amino acid.

[0230] 9. The isolated antibody heavy chain variable region of paragraph 8, further comprising a substitution at AHo position 46 for a negative charged amino acid.

[0231] 10. The isolated antibody heavy chain variable region of paragraph 8 or paragraph 9, wherein AHo position 51 is substituted for a negative charged amino acid.

[0232] 11. The isolated antibody heavy chain variable region of paragraph 8, 9, or 10, wherein AHo position 141 is substituted for a negative charged amino acid.

[0233] 12. The isolated antibody heavy chain variable region of paragraph 9, wherein AHo position 46 and AHo position 141 are substituted for a negative charged amino acid.

[0234] 13. The isolated antibody heavy chain of any of paragraphs 8-12, wherein the negative charged amino acid is aspartic acid.

[0235] 14. The isolated antibody heavy chain variable region of any of paragraphs 1-13, further comprising a heavy chain CH1 region.

[0236] 15. The isolated antibody heavy chain variable region of paragraph 14, wherein the CH1 region comprises one or more amino acid additions, deletions, or substitutions.

[0237] 16. The isolated antibody heavy chain variable region of paragraph 15, wherein an amino acid is substituted to introduce a positive- or negative-charged amino acid into the CH1 region.

[0238] 17. The isolated antibody heavy chain variable region of paragraph 16, wherein the positive- or negative-charged amino acid is introduced at EU position S183.

[0239] 18. The isolated antibody heavy chain variable region of paragraph 17, wherein EU position S183 is substituted for a positive-charged amino acid.

[0240] 19. The isolated antibody heavy chain variable region of paragraph 18, wherein the substitution is S183K.

[0241] 20. The isolated antibody heavy chain variable region of paragraph 17, wherein EU position S183 is substituted for a negative-charged amino acid.

[0242] 21. The isolated antibody heavy chain variable region of paragraph 20, wherein the substitution is S183D.

[0243] 22. An antibody heavy chain comprising the isolated antibody heavy chain variable region of any of paragraphs 1-21.

[0244] 23. The antibody heavy chain of paragraph 22, wherein the heavy chain comprises a CH3 region comprising one or more amino acid substitutions disfavoring homodimerization.

[0245] 24. The antibody heavy chain of paragraph 23, wherein a negative charged amino acid in the CH3 region is substituted with a positive charged amino acid.

[0246] 25. The antibody heavy chain of paragraph 24, wherein the negative charged amino acid is EU position D399, E356, or E357.

[0247] 26. The antibody heavy chain of paragraph 25, wherein the positive charged amino acid is lysine.

[0248] 27. The antibody heavy chain of paragraph 26, wherein the CH3 region comprises D399K and E356K substitutions.

[0249] 28. The antibody heavy chain of paragraph 23, wherein a positive charged amino acid in the CH3 region is substituted with a negative charged amino acid.

[0250] 29. The antibody heavy chain of paragraph 28, wherein the positive charged amino acid is EU position K370, K392, or K409.

[0251] 30. The antibody heavy chain of paragraph 29, wherein the negative charged amino acid is aspartic acid.

[0252] 31. The antibody heavy chain of paragraph 30, wherein the CH3 region comprises K392D and K409D substitutions.

[0253] 32. An antibody comprising the antibody heavy chain of any of paragraphs 24-27 and the antibody heavy chain of any of paragraphs 28-31.

[0254] 33. The antibody heavy chain of any of paragraphs 22-31, wherein the heavy chain comprises a CH2 region comprising one or more amino acid substitutions altering an Fc effector function.

[0255] 34. An antibody kappa light chain variable region comprising an amino acid substitution within the framework region at AHo position 51 or 141, wherein the substitution introduces a positive- or negative-charged amino acid into the kappa light chain variable region framework at said position.

[0256] 35. The antibody kappa light chain variable region of paragraph 34, wherein AHo position 51 or AHo position 141 is substituted for a positive charged amino acid.

[0257] 36. The antibody kappa light chain variable region of paragraph 35, further comprising a substitution at AHo position 46 for a positive charged amino acid.

[0258] 37. The antibody kappa light chain variable region of paragraph 35 or 36, wherein AHo position 51 is substituted for a positive charged amino acid.

[0259] 38. The antibody kappa light chain variable region of paragraph 35, 36, or 37, wherein AHo position 141 is substituted for a positive charged amino acid.

[0260] 39. The antibody light chain of any of paragraphs 35-38, wherein the positive charged amino acid is lysine.

[0261] 40. The antibody kappa light chain variable region of paragraph 34, wherein AHo position 51 or AHo position 141 is substituted for a negative charged amino acid.

[0262] 41. The antibody kappa light chain variable region of paragraph 40, further comprising at substitution at AHo position 46 for a negative charged amino acid.

[0263] 42. The antibody kappa light chain variable region of paragraph 40 or 41, wherein AHo position 51 is substituted for a negative charged amino acid.

[0264] 43. The antibody kappa light chain variable region of paragraph 40, 41, or 42, wherein AHo position 141 is substituted for a negative charged amino acid.

[0265] 44. The antibody light chain of any of paragraphs 40-43, wherein the positive charged amino acid is lysine.

[0266] 45. The antibody kappa light chain variable region of any of paragraphs 34-44, further comprising a kappa light chain constant region.

[0267] 46. The antibody kappa light chain variable region of paragraph 45, wherein the kappa light chain constant region comprises one or more amino acid additions, deletion, or substitutions.

[0268] 47. The isolated antibody kappa chain variable region of paragraph 46, wherein an amino acid is substituted to introduce a positive- or negative-charged amino acid into the kappa light chain constant region.

[0269] 48. The isolated antibody kappa chain variable region of paragraph 47, wherein the positive- or negative-charged amino acid is introduced at Eu position S 176.

[0270] 49. The isolated antibody kappa chain variable region of paragraph 48, wherein Eu position S176 is substituted for a positive charged amino acid.

[0271] 50. The isolated antibody kappa chain variable region of paragraph 49, wherein the substitution is S176K.

[0272] 51. The isolated antibody kappa chain variable region of paragraph 48, wherein Eu position S176 is substituted for a negative charged amino acid.

[0273] 52. The isolated antibody kappa chain variable region of paragraph 51, wherein the substitution is S176D.

[0274] 53. An antibody lambda light chain variable region comprising an amino acid substitution within the framework region at AHo position 51 or 141, wherein the substitution introduces a positive- or negative-charged amino acid into the lambda light chain variable region framework at said position.

[0275] 54. The antibody lambda light chain variable region of paragraph 53, further comprising a lambda light chain constant region.

[0276] 55. The antibody lambda light chain variable region of paragraph 54, wherein the lambda light chain constant region comprises one or more amino acid additions, deletion, or substitutions.

[0277] 56. The isolated antibody lambda chain variable region of paragraph 55, wherein an amino acid is substituted to introduce a positive- or negative-charged amino acid into the lambda light chain constant region.

[0278] 57. The isolated antibody lambda chain variable region of paragraph 56, wherein the positive- or negative-charged amino acid is introduced at Kabat position S 176.

[0279] 58. The isolated antibody lambda chain variable region of paragraph 57, wherein S176 is substituted for a positive charged amino acid.

[0280] 59. The isolated antibody lambda chain variable region of paragraph 58, wherein the substitution is S176K.

[0281] 60. The isolated antibody lambda chain variable region of paragraph 57, wherein S176 is substituted for a negative charged amino acid.

[0282] 61. The isolated antibody lambda chain variable region of paragraph 60, wherein the substitution is S176D or S176E.

[0283] 62. An isolated nucleic acid encoding the antibody heavy chain variable region of any of paragraphs 1-21, the antibody heavy chain of any of paragraphs 22-31, the antibody kappa light chain variable region of any of paragraphs 34-52, or the antibody light chain variable region of any of paragraphs 53-61.

[0284] 63. An expression vector comprising the isolated nucleic acid of paragraph 62 operably linked to a promoter.

[0285] 64. A recombinant host cell comprising the isolated nucleic acid of paragraph 62.

[0286] 65. A recombinant host cell comprising the expression vector of paragraph 63.

[0287] 66. An antigen binding protein comprising the isolated heavy chain variable region on any of paragraphs 1-21 and the isolated light chain variable region of any of paragraphs 22-31 or 34-52.

[0288] 67. The antigen binding protein of paragraph 66, wherein the antigen binding protein is an antibody comprising two heavy chains and two light chains.

[0289] 68. The antigen binding protein of paragraph 67, wherein the antibody is a bi-specific antibody.

[0290] 69. A pharmaceutical composition comprising the antigen binding protein of any of paragraphs 66-68.

### EXAMPLES

### Example 1

### Generation of Linkerbodies

[0291] The following Example describes the generation of heterodimeric antibodies (with an IgG1 backbone) wherein the light and heavy chains of (a) an anti-sclerostin antibody and (b) an anti-DKK1 antibody are covalently linked using a G4S linker to form a single polypeptide chain that binds sclerostin and a single polypeptide chain that binds DKK1 (“linkerbodies”). The polypeptide chains or half antibodies against the DKK1 and sclerostin targets are then assembled as a bispecific antibody through charge pair substitutions at the CH3 domain (i.e., one heavy chain contained K392D and K409D substitutions and the other contained E356K and D399K substitutions). The charge pair substitutions employ the electrostatic steering mechanism described herein, whereby heterodimer formation (DKK1 Ab—sclerostin Ab) is encouraged by attraction between negatively- and positively-charged residues in the CH3 regions and homodimers (two DKK1 Ab arms or two aclerostin Ab arms) are discouraged due to repulsion between amino acids having the same charge at corresponding regions of the CH3-CH3 interface. Charge pair substitutions were also introduced at the CH1-CL domain interface in order to reduce the level of aggregation (S183K/E in the heavy chain and S176E/K in the light chain). Further, some of the linkerbodies also had engineered inter-domain disulfide bonds at the VL-VH interface for further stabilization of heavy-light chain interactions. This was achieved by substituting G44 (Kabat) in the heavy chain and G100 (Kabat) in the light chain to cysteine residues.

[0292] The methods described above resulted in a high level of aggregation as determined by Size Exclusion Chromatography (SEC). In order to reduce the level of aggregation, a G4S linker was either added or replaced between the light and heavy chains with a charge pair substitution in the heavy and light chain constant regions (CH1-CL1). It was contemplated that the aggregation level would be reduced as a result of adding the charge pair substitution to the linkerbody constructs.

[0293] The linkerbody design in combination with charge pair substitutions in the CH1-CL interface still resulted in unwanted aggregation issues in several constructs.

### Example 2

### Generation of Heterodimeric Antibody without Linkers

[0294] The following Example describes the generation of a heterodimeric antibody having no linkers but, instead, comprising charge pair substitution in both the CH/CL interface and the CH3/CH3 interface of the parent antibodies. The resulting heterodimeric antibody comprising charged substitutions in the CH/CL and CH3/CH3 interfaces is referenced herein as heterodimeric antibody version 1 or heteroIg-v1.

[0295] Briefly, the following substitutions were introduced into DKK1 antibody 6.37.5: K392D (EU) and K409D (EU) substitutions in the CH3 domain, S183K (EU) substitution in the CH1 domain, and S176E (EU) substitution in the CL domain. The following substitutions were introduced into sclerostin antibody 27H6: E356K (EU) and D399K (EU) substitutions in the CH3 domain, S183E (EU) substitution in the CH1 domain, and S176K (EU) substitution in the CL domain. IgG1 scaffold was used in the heterodimeric version 1design.

[0296] Various input DNA ratios for the two different antibodies were used to maximize the IgG production and minimize the aggregation level (High Molecular Weight species). Using equal amount of DNA for both antibodies led to minimal aggregation level.

[0297] In order to assess the hetero Ig bispecific antibody formation, the material was purified and subjected to mass spectrometry analysis. NR mass analysis confirmed that the antibody product had two different light chains and two different heavy chains. To confirm the specific light-heavy chain pairing, the Fab fragments were generated through proteolysis (Pierce Fab Micro Preparation Kit). The mass analysis showed only two species, one corresponding to the DKK1 antibody heavy and light chain pairing and the other corresponding to that of a sclerostin antibody. The mass analysis confirmed the presence of heterodimeric antibodies having the correct pairing of light and heavy chains in both the arms of sclerostin/DKK1 heterodimeric antibody.

[0298] The mass analysis indicated the presence of a single species of antibody in the purified sample, with the observed mass matching the calculated mass of the heterodimeric antibody. The resulting heterodimeric antibody had two light chains and two heavy chains, with the heavy chain of the anti-sclerostin portion of the heterodimeric antibody having a S183E (EU) substitution in the CH1 domain and the light chain of the anti-sclerostin portion having a S176K (EU) substitution in the CL domain. The heavy chain of the anti-DKK1 portion of the heterodimeric antibody had a S183K (EU) substitution the CH1 domain and the light chain of the DKK1 portion had a S176E (EU) substitution in the CL domain. The CH3 domain of the anti-sclerostin portion of the heterodimeric antibody had E356K (EU) and D399K (EU) substitutions and the CH3 domain of the anti-DKK1 portion had substitutions at K392D (EU) and K409D (EU).

[0299] The ability of the generated heterodimeric antibodies to activate canonical Wnt signaling in the presence of sclerostin and/or DKK1 was evaluated in an independent osteoblast Wnt activation assay where cells are induced to differentiate and secrete factors that activate Wnt signaling in an autocrine fashion. In the assay, MC3T3-E1 cells were transfected with a Super-TOPFlash reporter construct, and stable cell lines were selected and evaluated. MC3T3E1/TetONWnt1/Luciferase is a mouse osteblast cell line engineered with a T-Cell factor response luciferase construct, Tet Repressor construct and a doxycycline inducible Wnt-1 construct using lentiviral transduction. In the presence of doxycycline, the MC3T3E1/TetONWnt1/Luc cells express Wnt-1 and induce signal transduction via the binding of Wnt-1 to cell surface LRP5/6 and Frizzled receptors resulting in the expression of luciferase. When MC3T3E1/TetONWnt1/Luc#5 cell are incubated in the presence of sclerostin and/or DKK1 Wnt signaling is inhibited by these proteins via the Lrp5/6 beta propeller 1 motif. The bioassay measures the dose dependent stimulatory effect in the cell-based reporter assay of the heterodimeric antibody and parental antibodies treated with a fixed concentration of sclerostin and/or DKK1.

[0300] Clone C10 demonstrated decreased reporter activity following incubation with either purified sclerostin or DKK1 proteins due to inhibition of Wnt pathway activation. Cells were cultured in Expansion Medium (Alpha-MEM medium containing 10% FBS, 1× Pen-Strep-Glu and 1.0 ug/ml of puromycin). When the cells reached 80% confluence, the medium was switched to Differentiation Medium “DM” (Expansion Medium, 50 ug/ml ascorbic acid and 10 mM beta-glycerophosphate) for 4 days. Following differentiation, this cell line produced an endogenous protein(s) that triggers canonical Wnt activation in an autocrine manner. Media was aspirated and 1000s of fresh DM containing various concentrations of monospecific or heterodimeric antibodies (pre-incubated for 4 hours with DKK1 and/or sclerostin for 45-60 min at 37° C.) was added to the wells for 24 hours. Luciferase activity was measured following manufacturer's instructions (Promega's Luciferase Assay System, Cat No: E4530). Various rat and human bispecific antibodies tested were capable of dose-dependently activating the osteoblast canonical Wnt pathway in the presence of both sclerostin and DKK1, further demonstrating that the antibodies can simultaneously neutralize the Wnt inhibitory function of both soluble proteins.

[0301] Results indicated that both the heterodimeric antibody produced according to the methods described in this Example and the linkerbody (which was used as a positive control) had very similar activity, further confirming correct pairing of the light and heavy chains.

### Example 3

### Generation of Heterodimeric Antibodies Having Substitutions in CH3 Domain(s), CH/CL Domain(s) and VH/VL Domain(s)

[0302] The following Example describes the generation of heterodimeric antibodies having one or more substitutions in each of the CH3, CH/CL and VH/VL domains to further favor correct pairing of the light and heavy chains. The heterodimeric antibodies are based on either Ab-5 and Ab-23 for the sclerostin portion and antibodies 6.147 and 6.37.5 for the DKK1 portion. An IgG2 class constant domain was used here in order to prevent ADCC and discourage effector functions. The resulting heterodimeric antibody comprising charged substitutions in the VH/VL, CH/CL and CH3/CH3 interfaces is referenced herein as heterodimeric antibody version 2 or heterolg-v2.

[0303] When co-expressing two different antibodies inside one cell, four different chains (HCl, LC1, HC2, LC2) are transcribed and translated. HCs can form either homodimer (HC1-HC1) or heterodimer (HC1-HC2); LCs can randomly assemble with two different HCs. In all, ten different combinations can occur [Paul Carter J Immunological Methods 248 (2001) 7-15]. Undesired heavy chain homodimers can be minimized by engineering the C_{H}3 region to only form a heterodimer. This Example demonstrates that undesirable LC/HC pairings can be eliminated by engineering the interface of the LC/HC to enforce the correct pairing of LCs with their cognate HCs. An electrostatic-steering mechanism was applied to direct the pairing and assembly of LC/HC; opposite polarity attracts desired complex subunits while the same polarity of homodimer subunits is repulsive.

[0304] Several criteria were applied when selecting the pairs of residues along the heavy chain and light chain interface for replacement by charged residues with opposing polarity, e.g., Asp or Lys, to control the correct pairing of LC with its cognate HC: 1) All positions are located in close proximity within both the VL/VH and CL/C_{H}1 interfaces; 2) All positions are buried and are well conserved among most, if not all, of different antibody families; 3) All positions have minimal impact on expression and antigen binding; and 4) The introduction of charged residues does not interfere with the binding of chaperone BiP to the C_{H}1 region in the process of antibody folding and assembly.

[0305] The selected residues at the VL/VH and CK/C_{H}1 interfaces for engineering are listed in Table 2. In the variable regions, predominant AHo position 46 (Q39 Kabat), AHo position 51 (Kabat G44), and AHo position 141 (Kabat Q105) in VH are in close proximity to AHo position 46 (Kabat Q38), AHo position 141 (Kabat Q100), and AHo position 51 (Kabat A43) in VL, respectively. In the constant regions, A141 (EU), P171 (EU), and S183 (EU) in C_{H}1 region contact residues F116 (EU), S162 (EU), and S176 (EU) in Ck respectively, but K147 (EU) in C_{H}1 can interact with either Q124 (EU), S131 (EU), or T180 (EU) in Ck region.

TABLE 2
The amino acid residues located at the VH/VL and CH1/Cκ interfaces
were selected for the introduction of charge pair residues. Germline residues of VH and VL
are numbered by different numbering systems, the bolded residues are the dominant ones.
The contact residues in VH/VL of most of antibodies are arrayed in the same row. Residues
of human IgG1 CH1 domain contacting the residues in Cκ region are also bolded and laid in
the same row. FW: Framework.

| VH | | | | | | | VL | | | | | |
|---|---|---|---|---|---|---|---|---|---|---|---|---|
| IMGT # | Kabat # | Eu # | AHo # | FW | Residue | contact | IMGT # | Kabat # | Eu # | AHo # | FW | Residue |
| 44 | 39 | 39 | 46 | 2 | Q/R/T | [symbol] | 44 | 38 | 38 | 46 | 2 | Q/G/H/L |
| 49 | 44 | 44 | 51 | 2 | G/R/A | [symbol] | * | 100 | 100 | 141 | 4 | Q/G/P |
| * | 105 | 109 | 141 | 4 | Q/K/R/S | [symbol] | 49 | 43 | 43 | 51 | 2 | A/G/S/P |
| C_{H}1 | | | | | | | Cκ | | | | | |
| IMGT # | Kabat # | Eu # | AHo # | Ref # | Residue | contact | IMGT # | Kabat # | Eu # | AHo # | Ref # | Residue |
| 20 | 139 | 141 | * | 176 | A | [symbol] | 5 | 116 | 116 | * | 158 | F |
| 82 | 175 | 171 | * | 212 | P | [symbol] | 81 | 162 | 162 | * | 211 | S |
| 86 | 188 | 183 | * | 230 | S | [symbol] | 86 | 176 | 176 | * | 230 | S |
| 26 | 145 | 147 | * | 182 | K | [symbol] | 13 | 124 | 124 | * | 166 | Q |
| 26 | 145 | 147 | * | 182 | K | [symbol] | 20 | 131 | 131 | * | 176 | S |
| 26 | 145 | 147 | * | 182 | K | [symbol] | 90 | 180 | 180 | * | 234 | T |

[0306] Wnt1-driven osteoblast reporter analysis of the heterodimeric antibodies showed robust activation of canonical Wnt signaling in the presence of both DKK1 and Sclerostin whereas control DKK1 antibodies (6.37.5, 6.147) and control Sclerostin antibody (Ab-23) only partially reversed inhibition.

[0307] The engineered heterodimeric antibodies were capable of neutralizing DKK1 and blocking recombinant Wnt3a induced TCF/LEF luciferase activity as seen in an independent cell based assay. In this assay, Wnt signaling was induced in an MC3T3 E1/STF-luciferase stable cell line with 100 ng/ml of recombinant Wnt3a protein (R&D Systems) for 30 minutes at 4° C. Cells were subsequently treated with human DKK1 protein at 0.15 ug/ml that was pre-mixed with control PBS or a two-fold serial dilution of the heterodimeric antibodies starting at 426.7 nM. The luciferase signal was determined after 24 hours as described above and the data were plotted by using PRISM software. Results indicated that the heterodimeric antibodies with variable regions targeting both the loop 2 region of sclerostin (i.e., amino acids 86-111 of SEQ ID NO: 1) and DKK1 were capable of neutralizing Sclerostin and DKK1 and increased reporter activity driven by Wnt3a.

### Example 4

### Functional Analysis of Parental and Heterodimeric Antibodies

[0308] Functional analysis of anti-Sclerostin parental antibodies directed against the loop 2 region of sclerostin (Ab23, Ab5, 20C3) and against non-loop 2 epitopes (27H6, Ab13, Ab-D, Ab-3) revealed a unique mechanism of action for each group of antibodies. A competition alpha screen binding assay was conducted to measure the effects of increasing concentrations of parental sclerostin antibodies on the interaction between his-tagged LRP6 and biotin-labeled human sclerostin. This analysis revealed that where anti-sclerostin antibodies that bound the loop 2 region of sclerostin potently inhibited the interaction between sclerostin and LRP6, antibodies directed against non-loop2 regions of sclerostin increased the interaction between these proteins. Furthermore, the engineered heterodimeric antibodies showed a similar phenomenon where heterodimeric antibodies directed against non-loop 2 sclerostin epitopes (i.e., 27H6-6.37.5, 6.147-27H6) promoted increased binding of LRP6 to sclerostin unlike the heterodimeric antibodies directed again the loop 2 region of sclerostin. All heterodimeric antibodies were found to compete with human DKK1 for binding to LRP6.

[0309] To understand the impact of this phenomenon on canonical Wnt pathway activation, parental antibodies and heterodimeric antibodies were studied in TCF-reporter cell based assays using osteoblasts and 293 cells. Cells were stimulated with either Wnt1 which binds to LRP6 beta propeller 1 motif or Wnt3a which binds to the LRP6 beta propeller 3 motif. Canonical Wnt pathway activation was measured by increased luciferase activity. In the assays, sclerostin and/or DKK1 were added to inhibit reporter activity and the neutralizing activity of different anti-sclerostin or anti-DKK1 antibodies was studied. Whereas sclerostin inhibited Wnt3a-driven activation of the TCF reporter, an anti-sclerostin non-loop 2 region binding antibody (27H6) but not control loop 2 binding antibodies (Ab5 and Ab23) potentiated Wnt3a signaling. Similar Wnt3a potentiation results were obtained with heterodimeric antibodies containing anti-sclerostin variable regions against non-loop 2 regions of sclerostin. In contrast, Wnt1 activity was restored by sclerostin inhibition with either antibody as shown by increased luciferase activity that did not exceed that of untreated controls. These effects were dependent on the presence of sclerostin since no potentiation was observed in the absence of sclerostin with the heterodimeric antibodies directed to the non-loop 2 regions of sclerostin. A similar analysis of other heterodimeric antibodies showed that heterodimeric antibodies comprising an anti-sclerostin portion that bound loop 2 of sclerostin failed to potentiate Wnt3a, whereas heterodimeric antibodies containing variable regions that bound non-loop2 regions of sclerostin did potentiate Wnt3a signaling. In addition, heterodimeric antibodies comprising variable regions that bound non-loop 2 regions of sclerostin potentiated Wnt3a signaling in the presence of DKK1, whereas monospecific non-loop 2 heterodimeric antibody potentiation is inhibited in the presence of DKK1. All canonical Wnt activation was inhibited in the presence of DKK1 alone consistent with the recent reports showing that the C-terminal region of DKK1 binds to the beta propeller 3 motif of LRP6 and blocks the interaction of Wnt3a class proteins with this region (Cheng et al, Nature Structural Mol Biol, 2011; Anh Dev Cell 2011). These data suggest that antibody-ligand complexes bound to the beta propeller domain 1 via sclerostin may impact the conformation of the receptor in such a manner as to increase Wnt3a/beta propeller 3 activity. A similar Wnt3a-dependent potentiation phenomenon by anti-LRP6 beta propeller 1-binding antibodies has previously been reported where these antibodies increased mitogenicity in cancer cell lines and growth of tumor xenografts (Ettenberg et al, PNAS 2010).

[0310] Wnt3a-potentiation by non-loop 2 binding anti-sclerostin antibodies was also observed in non-osteoblastic cells. This result raised the possibility that sclerostin/non-loop 2 binding antibody complexes could activate Wnt signaling in any cell type expressing LRP6 provided Wnt3 class proteins or beta propeller 3 binding proteins are present and DKK1 is absent. In the case of a heterodimeric antibody, potentiation may occur in the presence of DKK1. Based on these observations and to mitigate risk of mitogenicity in non-osteoblastic cells, new heterodimeric antibodies were engineered with anti-sclerostin variable regions directed against the loop 2 region which were shown to robustly increase reporter activity in the Wnt1-osteoblast TCF reporter assay.

[0311] In addition, parental anti-sclerostin antibodies that bind non-loop 2 regions of sclerostin do not disrupt the interaction of sclerostin with its cognate LRP receptors and preserve either LRP6 interactions or LRP4 interactions. Although parental sclerostin antibodies against the loop 2 region of sclerostin and heterodimeric antibodies inhibited the interaction between LRP6 and sclerostin, they failed to inhibit the interaction between sclerostin and LRP4 in co-immunoprecipitation experiments. In contrast, parental antibodies or heterodimeric antibodies containing anti-non-loop 2 variable domains all decreased binding between LRP4 and Sclerostin (19D11, 27H6, L8 and N22). New heterodimeric antibodies were engineered in an IgG2 backbone.

### Example 5

### Heterodimeric Antibodies Demonstrated Activity In Vivo

[0312] The following Example demonstrates that heterodimeric antibodies generated according to the methods described in Examples 2 and 3 increased bone mineral density in an animal model of low bone mineral density.

[0313] Male 10 week old B6D2F1 mice were used in this study. At the beginning of the study, animals were divided into 5 groups (n=9/group), balanced by both body weight and bone mineral density (BMD) at the femur-tibia region by in vivo DXA. Mice were subcutaneously injected with either vehicle (proline) or sclerostin-Ab (Scl-Ab), or DKK1-Ab or combination of Scl-Ab and DKK1-Ab (combination) or heterodimeric antibody (hetero Ig) twice per week for 3 weeks. The antibodies were dosed at 12.5 mg/ml. Animals were scanned weekly by in vivo DXA to monitor the bone anabolic activity of the drug treatments at lumbar vertebral and femur-tibia regions. The mice were subsequently euthanized at the end of study. Femurs were collected for ex vivo densitometry by μCT and bone strength analysis.

[0314] FIG. 1 illustrates the in vivo study design for the following heterodimeric antibodies: (1) Ab23-Ab6.147 v2, (2) Ab5-Ab6.37.5 v1, and (3) Ab5-Ab6.147 v1. Ab-5 is used as mono-therapy control and DVD Ig 6.147-Ab23 (described in International Publication No. WO 2012/118903) is used as bispecific antibody control in this study. The DVD Ig was dosed slightly higher (17 mg/kg) due to the higher molecular weight than the monotherapy control and heterodimeric antibodies. It must be noted here that the heterodimeric antibody format is monovalent against each target, whereas the DVD is bivalent against each target. Therefore, although in terms of molarity, the dosing level makes DVD and heterodimeric antibody (hetero Ig) equivalent, they are different in terms of number of binding sites (paratopes).

[0315] FIG. 2 compares percentage of bone mass density (BMD) increase in lumbar vertebrae and leg in mice between monospecific Ig (Ab5), bispecific DVD (6.147-Ab23) and heterodimeric antibodies 1, 2, & 3 described above at week 3.

[0316] The data shown in FIG. 2 clearly demonstrate heterodimeric antibodies Ab5-6.37.5 v1 (heterodimeric antibody 2—“heteroIg2”) and 785-6.147 v1 (heterodimeric antibody 3—“heteroIg3”) increased the bone mass density. However, the heterodimeric antibody Ab23-6.147 v2 (heterodimeric antibody 1—“heteroIg1”) which has extra charge pair substitution in the variable domain interface (VH/VL) did not increase the BMD. It was expected that adding additional charge pair substitution in the variable domain would help achieve specific pairing of the light and heavy chains (e.g., Ab5 light pairing with Ab5 heavy chain). But, it appears that in this case the additional charge pair substitution in the variable domain led to poor stability of the heterodimeric antibody. The PK study that followed this PD study indeed demonstrated DKK1 arm of the heterodimeric antibody Ab23-6.147 having poor in vivo stability.

### Example 6

### Pharmacokinetic Data

[0317] Four different pharmacokinetic assays (i.e., sclerostin/DKK1 Assay; sclerostin/Fc Assay; DKK1/sclerostin Assay; and FC/FC bridging ELISA Assay) were performed in order to capture and detect heterodimeric antibodies in serum samples.

[0318] Sclerostin/DKK1 Assay: Briefly, half area plates were coated with 1 μg/ml of human sclerostin in 1×PBS and incubated overnight at 4° C. The plates were blocked for at least 1 h by I-Block buffer. Standards (Stds)) and quality control samples (QCs) were prepared in Rat serum samples. Standards, QCs, and serum samples were diluted 1:30 in buffer (1×PBS, 1M NaCl, 0.5% tween 20, and 10 mg/ml BSA). The diluted Stds, QCs, and samples were then loaded into ELISA plate and incubated for 90 min. Then the ELISA plate was washed and 200 ng/ml of biotinylated human DKK1 in the buffer was added and incubated for 90 minutes. The plate was washed and 200 ng/ml Streptavidin-HRP conjugated added and incubated for 30 minutes. After washing the plate, TMB substrate was added. The reaction was stopped after 15 minutes by addition of 1 M of sulfuric acid. The plate was then read by a SpectraMax plate reader.

[0319] Sclerostin/FC Assay:

[0320] Half area plates were coated with 1 μg/ml of human sclerostin in 1×PBS and incubated overnight at 4° C. The plates were blocked for at least 1 hour by I-Block buffer. Standards (Stds)) and quality control samples (QCs) were prepared in Rat serum samples. Standards, QCs, and serum samples were diluted 1:30 in buffer (1×PBS, 1M NaCl, 0.5% tween 20, and 10 mg/ml BSA). The diluted Stds, QCs, and samples were then loaded into ELISA plate and incubated for 90 minutes. Then the ELISA plate was washed and 10 ng/ml of HRP conjugated anti-human Fc antibody, Mab 1.35.1 was added and incubated for 90 minutes. After washing the plate, TMB substrate was added. The reaction was stopped after 15 minutes by addition of 1 M of sulfuric acid. The plate was then read by a SpectraMax plate reader.

[0321] DKK1/FC Assay:

[0322] Half area plates were coated with 1 μg/ml of human DKK1 in 1×PBS and incubated overnight at 4° C. The plates were blocked for at least 1 hour by I-Block buffer. Standards (Stds)) and quality control samples (QCs) were prepared in Rat serum samples. Standards, QCs, and serum samples were diluted 1:30 in buffer (1×PBS, 1M NaCl, 0.5% tween 20, and 10 mg/ml BSA). The diluted Stds, QCs, and samples were then loaded into ELISA plate and incubated for 90 min. Then the ELISA plate was washed and 10 ng/ml of HRP conjugated anti-hu Fc antibody, Mab 1.35.1 was added and incubated for 90 minutes. After washing the plate, TMB substrate was added. The reaction was stopped after 15 minutes by addition of 1 M of sulfuric acid. The plate was then read by a SpectraMax plate reader.

[0323] FC/FC Bridging ELISA Assay:

[0324] Briefly, half area plates were coated with 0.2 μg/ml of anti-human Fc antibody, Mab 1.35.1 in 1×PBS and incubated overnight at 4° C. The plates were blocked for at least 1 hour by I-Block buffer. Standards (Stds) and quality control samples (QCs) were prepared in rat serum samples. Standards, QCs, and serum samples were diluted 1:30 in buffer (1×PBS, 1M NaCl, 0.5% tween 20, and 10 mg/ml BSA). Then, the diluted Stds, QCs, and samples were loaded into ELISA plate and incubated for 90 min. Then the ELISA plate was washed and 50 ng/ml of HRP conjugated anti-human Fc antibody, Mab 1.35.1 was added and incubated for 30 min. After washing the plate, TMB substrate was added. The reaction was stopped after 10 minutes by addition of 1 M of sulfuric acid. The plate was then read by a SpectraMax plate reader.

[0325] FIG. 3 shows the pharmacokinetic (PK) profiles of the four sclerostin-DKK1 heterodimeric antibodies tested (i.e., Ab23-6.37.5 v1, Ab5-6.37.5 v1, Ab5-6.147 v2 and Ab23-6.147 v2). Results indicated that heterodimeric antibodies comprising a charged amino acid substitutions in the VH/VL domains negatively impacted the stability as the PK profiles based on the sclerostin/DKK1 & DKK1/Fc assays deviated from that of the sclerostin/Fc & Fc/Fc assays.

### Example 7

### Controlling the Correct Pairing of Light Chain with its Cognate Heavy Chain During the Production of Heterodimeric Antibodies by Electrostatic Steering Mechanism

[0326] When co-expressing two different antibodies inside one cell, four different chains (HC1, LC, HC2, LC2) are transcribed and translated. HCs can form either homodimer or heterodimer; LCs can randomly assemble with two different HCs. Ten different combinations can occur [Paul Carter J Immunological Methods 248 (2001) 7-15]. The undesired side products derived from heavy chain homodimer can be minimized by engineering the CH3 region to only form a heterodimer. This Example demonstrates that undesirable LC/HC pairings can be eliminated by engineering the interface of the LC/HC to enforce the correct pairing of LCs with their cognate HCs. An electrostatic-steering mechanism was applied to direct the pairing and assembly of LC/HC, as the opposite polarity is attractive while the same polarity is repulsive.

[0327] Several criteria were applied when selecting the pairs of residues along the heavy chain and light chain interface that were replaced by charged residues with opposing polarity, e.g., Asp or Lys, to control the correct pairing of LC with its cognate HC: 1) All positions are located in close proximity within both the VL/VH and CL/CH1 interfaces; 2) All positions are buried and are well conserved among most, if not all, of different antibody families; 3) All positions have minimal impact on expression and antigen binding; and 4) The introduction of charged residues does not interfere with the binding of chaperone BiP to the CH1 region in the process of antibody folding and assembly.

[0328] The selected residues at the VL/VH and Cκ/CH1 interfaces for engineering Her2/EGFR heterodimeric antibodies are listed in Table 2. In the variable regions, predominant Q39 (Kabat numbering; AHo position 46), G44 (AHo position 51), and Q105 (AHo position 141) in VH are in close proximity to Q38 (Kabat numbering; AHo position 46), Q100 (AHo position 141), and A43 (AHo position 51) in VL, respectively. In the constant regions, A141 (Eu numbering), P171, and S183 in CH1 region contact residues F116 (Eu numbering), S162, and S176 in Ck respectively, but K147 (Eu numbering) in CH1 can interact with either Q124, S131, or T180 (Eu numbering) in Ck region.

[0329] A proof of concept heterodimeric IgG was constructed using v-genes from an anti-EGFR antibody and an anti-HER2 antibody. FIG. 4 shows different configurations for making heterodimeric antibody variants. One Fc chain has ADCC-enhancement substitutions S298T+A330M+K334V in CH2 domain and heterodimerizing substitutions K392D+K409D in the CH3 domain, while the other Fc chain has ADCC-enhancement substitutions L234Y+K290Y+Y296W in the lower hinge region and CH2 domain along with heterodimerizing substitutions E356K+D399K in the CH3 domain. The antibodies prefer to form heterodimers which can induce strong ADCC killing when specifically binding to the tumor cells with their Fab regions.

TABLE 2
Table 2: The amino acid residues located at the VH/VL and CH1/Cκ interfaces
were selected for the introduction of charge pair residues. Germline residues of VH and VL
are numbered by different numbering systems, the bolded residues are the dominant ones.
The contact residues in VH/VL of most of antibodies are arrayed in the same row. Residues
of human IgG1 CH1 domain contacting the residues in Cκ region are also bolded and laid in
the same row. FW: Framework.

| VH | | | | | | | VL | | | | | |
|---|---|---|---|---|---|---|---|---|---|---|---|---|
| IMGT # | Kabat # | Eu # | AHo # | FW | Residue | contact | IMGT # | Kabat # | Eu # | AHo # | FW | Residue |
| 44 | 39 | 39 | 46 | 2 | Q/R/T | [symbol] | 44 | 38 | 38 | 46 | 2 | Q/G/H/L |
| 49 | 44 | 44 | 51 | 2 | G/R/A | [symbol] | * | 100 | 100 | 141 | 4 | Q/G/P |
| * | 105 | 109 | 141 | 4 | Q/K/R/S | [symbol] | 49 | 43 | 43 | 51 | 2 | A/G/S/P |
| C_{H}1 | | | | | | | Cκ | | | | | |
| IMGT # | Kabat # | Eu # | AHo # | Ref # | Residue | contact | IMGT # | Kabat # | Eu # | AHo # | Ref # | Residue |
| 20 | 139 | 141 | * | 176 | A | [symbol] | 5 | 116 | 116 | * | 158 | F |
| 82 | 175 | 171 | * | 212 | P | [symbol] | 81 | 162 | 162 | * | 211 | S |
| 86 | 188 | 183 | * | 230 | S | [symbol] | 86 | 176 | 176 | * | 230 | S |
| 26 | 145 | 147 | * | 182 | K | [symbol] | 13 | 124 | 124 | * | 166 | Q |
| 26 | 145 | 147 | * | 182 | K | [symbol] | 20 | 131 | 131 | * | 176 | S |
| 26 | 145 | 147 | * | 182 | K | [symbol] | 90 | 180 | 180 | * | 234 | T |

[0330] In a proof-of-concept study, a Fn3 tag (12 KDa) was inserted at the N-terminus of anti-EGFr Ab2 HC and a Fn3-Flag-His6 tag (14 KDa) was fused in frame to the C-terminus of anti-EGFr Ab2 LC, so the 4 different combinations of LC/HC can be distinguished in SDS-PAGE gel by different sizes: 176 KDa for the wanted LC1/HC1::LC2-Fn3-FH/Fn3-HC2 or unwanted LC2-Fn3-FH/HC1::LC1/Fn3-HC2; 162 KDa for unwanted LC1/HC1::LC1/Fn3-HC2; and 190 KDa for unwanted LC2-Fn3-FH/HC1::LC2-Fn3-FH/Fn3-HC2. The composition of 176 KDa product was determined subsequently by Mass Spectrometry with partial reduction. A dual-antigen binding plate ELISA was utilized to screen the favorable variants having preferred LC/HC pairings.

[0331] Different variants (Table 3) were investigated to find the best combination with highest dual antigen binding and correct LC/HC pairing. When compared to the mono-specific anti-Her2 Abl (C01) or anti-EGFr Ab2 (C07), which did not generate any binding signal, and the internal control C11, which is made of four regular chains with random LC/HC pairings, variants 1C02, 1C04, 2A05, 2B04, 2B05 and 5D03 showed improved binding to dual antigens (Her2 and EGFr extracellular domain) in a dose-dependent manner. Variants 2B05 and 5D03 had the strongest binding as the curves shifted to the left most. These variants also had the dominant formation of full-length heterodimer IgG1 in the SDS-PAGE gel. Expression testing indicated that adding modifier XBP1 slightly boosted the expression level of heterodimeric antibody variants while another modifier ERP23 rarely boosted expression.

TABLE 3
Variants made by electrostatic steering mechanism. The amino acid
changes in the VH/VL and CH1/CL interface of the anti-Her2 Ab1 and
the anti-EGFr Ab2 as heterodimeric IgG1 where the HC of Ab1 has
S298T + A330M + K334V in CH2 domain and K392D + K409D
in CH3 domain; the HC of Ab2 has L234Y + K209Y + Y296W in
lower hinge and CH2 domain and E356K + D399K in CH3 domain. An
Fn3 tag was inserted at the N-terminus of anti-EGFr Ab2 HC and an
Fn3-Flag-His6 tag was fused in frame to the C-terminus of anti-EGFr
Ab2 LC. The residues in variable regions (VH or VL) are numbered by
Kabat numbering system while residues in constant regions (CH1 or CL)
are numbered by Eu numbering system.

| | |
|---|---|
| anti-Her2 Ab1 HC | |
| (K392D + K409D) | anti-Her2 Ab1 LC |

| Variant | VH1 | CH1 | VL1 | CL |
|---|---|---|---|---|
| C12 | Q39K + G44K | | Q38D + Q100D | |
| C13 | Q39K + G44K | | Q38D + Q100D | |
| C14 | Q39K + G44K | | Q38D + Q100D | |
| C15 | Q39K + Q105K | | Q38D + A43D | |
| C16 | Q39K + Q105K | | Q38D + A43D | |
| C17 | Q39K + Q105K | | Q38D + A43D | |
| C18 | G44K + Q105K | | Q100D + A43D | |
| C19 | G44K + Q105K | | Q100D + A43D | |
| C20 | G44K + Q105K | | Q100D + A43D | |
| 1A01 | | K147K + S183K | | Q124D + S176D |
| 1A02 | | K147K + S183K | | Q124D + S176D |
| 1A03 | | K147K + S183K | | Q124D + S176D |
| 1A04 | | K147K + S183K | | S131D + S176D |
| 1A05 | | K147K + S183K | | S131D + S176D |
| 1A06 | | K147K + S183K | | S131D + S176D |
| 1B01 | | K147K + S183K | | S176D + T180D |
| 1B02 | | K147K + S183K | | S176D + T180D |
| 1B03 | | K147K + S183K | | S176D + T180D |
| 1B04 | Q39K + Q105K | K147D + S183D | Q38D + A43D | Q124K + S176K |
| 1B05 | Q39K + Q105K | K147D + S183D | Q38D + A43D | Q124K + S176K |
| 1B06 | Q39K + Q105K | K147D + S183D | Q38D + A43D | Q124K + S176K |
| 1C01 | Q39K + Q105K | K147D + S183D | Q38D + A43D | S131K + S176K |
| 1C02 | Q39K + Q105K | K147D + S183D | Q38D + A43D | S131K + S176K |
| 1C03 | Q39K + Q105K | K147D + S183D | Q38D + A43D | S131K + S176K |
| 1C04 | Q39K + Q105K | K147D + S183D | Q38D + A43D | S176K + T180K |
| 1C05 | Q39K + Q105K | K147D + S183D | Q38D + A43D | S176K + T180K |
| 1C06 | Q39K + Q105K | K147D + S183D | Q38D + A43D | S176K + T180K |
| 1D01 | | K147K | | Q124D |
| 1D02 | | K147K | | Q124D |
| 1D03 | | K147K | | Q124D |
| 1D04 | | K147K | | S131D |
| 1D05 | | K147K | | S131D |
| 1D06 | | K147K | | S131D |
| 2A01 | | S183K | | S176D |
| 2A02 | | S183K | | S176D |
| 2A03 | | S183K | | S176D |
| 2A04 | Q39K + Q105K | K147D | Q38D + A43D | Q124K |
| 2A05 | Q39K + Q105K | K147D | Q38D + A43D | Q124K |
| 2A06 | Q39K + Q105K | K147D | Q38D + A43D | Q124K |
| 2B01 | Q39K + Q105K | K147D | Q38D + A43D | S131K |
| 2B02 | Q39K + Q105K | K147D | Q38D + A43D | S131K |
| 2B03 | Q39K + Q105K | K147D | Q38D + A43D | S131K |
| 2B04 | Q39K + Q105K | K147D | Q38D + A43D | T180K |
| 2B05 | Q39K + Q105K | K147D | Q38D + A43D | T180K |
| 2B06 | Q39K + Q105K | K147D | Q38D + A43D | T180K |
| 2C01 | Q39K + Q105K | S183D | Q38D + A43D | S176K |
| 2C02 | Q39K + Q105K | S183D | Q38D + A43D | S176K |
| 2C03 | Q39K + Q105K | S183D | Q38D + A43D | S176K |
| 5A01 | Q39K + Q105K | A141D | Q38D + A43D | F116K |
| 5A02 | Q39K + Q105K | A141D | Q38D + A43D | F116K |
| 5A03 | Q39K + Q105K | A141D | Q38D + A43D | F116K |
| 5A04 | Q39K + Q105K | A141D | Q38D + A43D | F116K |
| 5A05 | Q39K + Q105K | P171D | Q38D + A43D | S162K |
| 5A06 | Q39K + Q105K | P171D | Q38D + A43D | S162K |
| 5B01 | Q39K + Q105K | P171D | Q38D + A43D | S162K |
| 5B02 | Q39K + Q105K | P171D | Q38D + A43D | S162K |
| 5B03 | Q39K + Q105K | K147D | Q38D + A43D | S131K |
| 5B04 | Q39K + Q105K | K147D | Q38D + A43D | S131K |
| 5B05 | Q39K + Q105K | K147D | Q38D + A43D | S131K |
| 5B06 | Q39K + Q105K | K147D | Q38D + A43D | S131K |
| 5C01 | Q39K + Q105K | S183D | Q38D + A43D | S176K |
| 5C02 | Q39K + Q105K | S183D | Q38D + A43D | S176K |
| 5C03 | Q39K + Q105K | S183D | Q38D + A43D | S176K |
| 5C04 | Q39K + Q105K | S183D | Q38D + A43D | S176K |
| 5C05 | Q39K + Q105K | A141D | Q38D + A43D | F116K |
| 5C06 | Q39K + Q105K | A141D | Q38D + A43D | F116K |
| 5D01 | Q39K + Q105K | A141D | Q38D + A43D | F116K |
| 5D02 | Q39K + Q105K | A141D | Q38D + A43D | F116K |
| 5D03 | Q39K + Q105K | P171D | Q38D + A43D | S162K |
| 5D04 | Q39K + Q105K | P171D | Q38D + A43D | S162K |
| 5D05 | Q39K + Q105K | P171D | Q38D + A43D | S162K |
| 5D06 | Q39K + Q105K | P171D | Q38D + A43D | S162K |
| 6A01 | Q39K + Q105K | K147D | Q38D + A43D | S131K |
| 6A02 | Q39K + Q105K | K147D | Q38D + A43D | S131K |
| 6A03 | Q39K + Q105K | K147D | Q38D + A43D | S131K |
| 6A04 | Q39K + Q105K | K147D | Q38D + A43D | S131K |
| 6A05 | Q39K + Q105K | S183D | Q38D + A43D | S176K |
| 6A06 | Q39K + Q105K | S183D | Q38D + A43D | S176K |
| 6B01 | Q39K + Q105K | S183D | Q38D + A43D | S176K |
| 6B02 | Q39K + Q105K | S183D | Q38D + A43D | S176K |

| | |
|---|---|
| anti-EGFr Ab2 HC | |
| (E356K + D399K) | anti-EGFr Ab2 LC |

| Variant | VH2 | CH1 | VL2 | CL |
|---|---|---|---|---|
| C12 | Q39D + G44D | | Q38K + G100K | |
| C13 | Q39D + Q105D | | Q38K + A43K | |
| C14 | G44D + Q105D | | G100K + A43K | |
| C15 | Q39D + G44D | | Q38K + G100K | |
| C16 | Q39D + Q105D | | Q38K + A43K | |
| C17 | G44D + Q105D | | G100K + A43K | |
| C18 | Q39D + G44D | | Q38K + G100K | |
| C19 | Q39D + Q105D | | Q38K + A43K | |
| C20 | G44D + Q105D | | G100K + A43K | |
| 1A01 | | K147D + S183D | | Q124K + S176K |
| 1A02 | | K147D + S183D | | S131K + S176K |
| 1A03 | | K147D + S183D | | S176K + T180K |
| 1A04 | | K147D + S183D | | Q124K + S176K |
| 1A05 | | K147D + S183D | | S131K + S176K |
| 1A06 | | K147D + S183D | | S176K + T180K |
| 1B01 | | K147D + S183D | | Q124K + S176K |
| 1B02 | | K147D + S183D | | S131K + S176K |
| 1B03 | | K147D + S183D | | S176K + T180K |
| 1B04 | G44D + Q105D | S183K | G100K + A43K | Q124D + S176D |
| 1B05 | G44D + Q105D | S183K | G100K + A43K | S131D + S176D |
| 1B06 | G44D + Q105D | S183K | G100K + A43K | S176D + T180D |
| 1C01 | G44D + Q105D | S183K | G100K + A43K | Q124D + S176D |
| 1C02 | G44D + Q105D | S183K | G100K + A43K | S131D + S176D |
| 1C03 | G44D + Q105D | S183K | G100K + A43K | S176D + T180D |
| 1C04 | G44D + Q105D | S183K | G100K + A43K | Q124D + S176D |
| 1C05 | G44D + Q105D | S183K | G100K + A43K | S131D + S176D |
| 1C06 | G44D + Q105D | S183K | G100K + A43K | S176D + T180D |
| 1D01 | | K147D | | Q124K |
| 1D02 | | K147D | | S131K |
| 1D03 | | S183D | | S176K |
| 1D04 | | K147D | | Q124K |
| 1D05 | | K147D | | S131K |
| 1D06 | | S183D | | S176K |
| 2A01 | | K147D | | Q124K |
| 2A02 | | K147D | | S131K |
| 2A03 | | S183D | | S176K |
| 2A04 | G44D + Q105D | K147K | G100K + A43K | Q124D |
| 2A05 | G44D + Q105D | K147K | G100K + A43K | S131D |
| 2A06 | G44D + Q105D | S183K | G100K + A43K | S176D |
| 2B01 | G44D + Q105D | K147K | G100K + A43K | Q124D |
| 2B02 | G44D + Q105D | K147K | G100K + A43K | S131D |
| 2B03 | G44D + Q105D | S183K | G100K + A43K | S176D |
| 2B04 | G44D + Q105D | K147K | G100K + A43K | Q124D |
| 2B05 | G44D + Q105D | K147K | G100K + A43K | S131D |
| 2B06 | G44D + Q105D | S183K | G100K + A43K | S176D |
| 2C01 | G44D + Q105D | K147K | G100K + A43K | Q124D |
| 2C02 | G44D + Q105D | K147K | G100K + A43K | S131D |
| 2C03 | G44D + Q105D | S183K | G100K + A43K | S176D |
| 5A01 | Q39D + Q105D | A141K | Q38K + A43K | F116D |
| 5A02 | Q39D + Q105D | P171K | Q38K + A43K | S162D |
| 5A03 | Q39D + Q105D | K147K | Q38K + A43K | S131D |
| 5A04 | Q39D + Q105D | S183K | Q38K + A43K | S176D |
| 5A05 | Q39D + Q105D | A141K | Q38K + A43K | F116D |
| 5A06 | Q39D + Q105D | P171K | Q38K + A43K | S162D |
| 5B01 | Q39D + Q105D | K147K | Q38K + A43K | S131D |
| 5B02 | Q39D + Q105D | S183K | Q38K + A43K | S176D |
| 5B03 | Q39D + Q105D | A141K | Q38K + A43K | F116D |
| 5B04 | Q39D + Q105D | P171K | Q38K + A43K | S162D |
| 5B05 | Q39D + Q105D | K147K | Q38K + A43K | S131D |
| 5B06 | Q39D + Q105D | S183K | Q38K + A43K | S176D |
| 5C01 | Q39D + Q105D | A141K | Q38K + A43K | F116D |
| 5C02 | Q39D + Q105D | P171K | Q38K + A43K | S162D |
| 5C03 | Q39D + Q105D | K147K | Q38K + A43K | S131D |
| 5C04 | Q39D + Q105D | S183K | Q38K + A43K | S176D |
| 5C05 | G44D + Q105D | A141K | G100K + A43K | F116D |
| 5C06 | G44D + Q105D | P171K | G100K + A43K | S62D |
| 5D01 | G44D + Q105D | K147K | G100K + A43K | S131D |
| 5D02 | G44D + Q105D | S183K | G100K + A43K | S176D |
| 5D03 | G44D + Q105D | A141K | G100K + A43K | F116D |
| 5D04 | G44D + Q105D | P171K | G100K + A43K | S162D |
| 5D05 | G44D + Q105D | K147K | G100K + A43K | S131D |
| 5D06 | G44D + Q105D | S183K | G100K + A43K | S176D |
| 6A01 | G44D + Q105D | A141K | G100K + A43K | F116D |
| 6A02 | G44D + Q105D | P171K | G100K + A43K | S162D |
| 6A03 | G44D + Q105D | K147K | G100K + A43K | S131D |
| 6A04 | G44D + Q105D | S183K | G100K + A43K | S176D |
| 6A05 | G44D + Q105D | A141K | G100K + A43K | F116D |
| 6A06 | G44D + Q105D | P171K | G100K + A43K | S162D |
| 6B01 | G44D + Q105D | K147K | G100K + A43K | S131D |
| 6B02 | G44D + Q105D | S183K | G100K + A43K | S176D |

[0332] Variants 1C02, 1C04, 2A05, 2B05 and 5D03 were made by transiently transfecting HEK 2936E cells, and purified with a Protein A column then polished with Superdex 200 Size-Exclusion Column. From 900 mL of supernatant, 1.2-6.8 mgs of final products with ˜100% purity by analytical SEC were obtained. In the non-reduced SDA-PAGE gel (FIG. 4, left), all variants have a very dominant full-length IgG1 in which a Fn3 tag was inserted at the N-terminus of anti-EGFr Ab2 HC and a Fn3-Flag-His6 tag was fused in frame to the C-terminus of anti-EGFr Ab2 LC. Variants 2B05 and 5D03 are the purest with very minimal level of smaller bands. Under reduced condition, four different chains (Fn3-HC2 at 61 KDa; HC1 at 50 KDa; LC2-Fn3-Flag-His6 at 36 KDa; LC1 at 23 KDa) were separated due to their different sizes. The four different chains were shown to be a 1:1:1:1 ratio in the assembled full-length IgG1 antibody. The components and correct LC/HC pairings were confirmed by mass spectrometry.

### Example 8

### Her2/EGFR Heterodimeric Antibodies Maintained Blocking Function of the Parent Antibodies

[0333] This Example demonstrates that the heterodimeric antibodies described in Example 7 maintain the blocking function of the individual antibodies from which they were made. Moreover, the heterodimeric antibodies were capable of mediating ADCC against target-expressing cells.

[0334] In addition to dual antigen binding, variants 2B05 and 5D03 were chosen to test their functionality by a cell-based assay. A CHO cell line was stably transfected with human EGFr. When ligand EGF was added in the culture medium, the receptor EGFr on the CHO cell surface was activated and phosphorylated, turning on downstream signal pathways, such as MAPK, ERK1/2, PI3K, JAK/STAT, and PKC. The anti-EGFr antibody from which 2B05 and 5D03 were derived blocked the ligand EGF binding to the receptor EGFr and inhibited the phosphorylation of receptor EGFr at IC50=2.7 nM. The combo of anti-EGFr antibody and anti-Her2 antibody functioned similarly at IC50=3.2 nM. Anti-EGFr×Her2 heterodimeric antibody variants 2B05 and 5D03 both were comparable in the phosphorylation of receptor EGFr at IC50=4.2 nM and IC50=4.6 nM respectively, indicating the anti-EGFr Fab arm of heterodimeric antibody variants 2B05 and 5D03 was functioning comparable to the wild type anti-EGFr antibody.

[0335] BT474 is a human breast tumor cell line. BT474 cells express both Her2 (Erb2) and Her3 (Erb3) on the surface. Anti-Her2 antibodies can bind to domain IV of Her2, triggering internalization and degradation of receptors [Wehrman T S, et al. (2006) PNAS 103(50):19063-19068 and Buschenfelde C M et al (2002) Cancer Res 62(8):2244-2247]. The antibody thus blocks downstream signaling pathways [Yakes F M, et al. (2002) Cancer Res 62(14):4132-4141 and Scotti M L et al (2008) Breast Cancer Res Treat 111(2):241-50], such as Raf/MEK 1&2/ERK 1&2 and PI3K/Akt pathways. The anti-Her2 antibody does not decrease Her2 phosphorylation but inhibits basal Her3 phosphorylation in BT474 cells. When no ligand is added in the culture medium of BT474 cells, the Her2 antibody alone blocked the phosphorylation of Her3 at IC50=2.8 nM. The combination of anti-EGFr antibody and anti-Her2 antibody functioned similarly at IC50=5.2 nM. Anti-EGFr×Her2 heterodimeric antibody variants 2B05 and 5D03 both inhibited the basal level phosphorylation of receptor Her3 at IC50=3.0 nM and IC50=3.6 nM respectively, indicating that the anti-Her2 arm was functioning.

[0336] The combined data from the above two different cell-based assays suggested that both arms of anti-EGFr×Her2 heterodimeric antibody variants 2B05 and 5D03 work properly in inhibiting the activation of EGFr and Her2.

### Example 9

### Her2/EGFR Heterodimeric Antibodies are Capable of Mediating ADCC Killing of Tumor Cells

[0337] N87 is a human gastric tumor cell line expressing high levels of Her2 and moderate levels of EGFr. An irrelevant human IgG1 was used as a control. The anti-EGFr×Her2 heterodimeric antibody variants 2B05 and 5D03 have incorporated ADCC enhancement substitutions and heterodimerizing substitutions in their Fc regions. The ADCC assay was carried out to test whether the heterodimeric antibody variants bind to their specific antigens and induce killing of N87 cells. At 1 μg/mL the irrelevant human IgG1 control antibody had a background lysis of 30% and did not show a dose-dependent response when it was titrated down. Both variants 2B05 and 5D03 had much higher specific lysis at 1 μg/mL concentration and showed a dose-dependent response with EC50 at 0.10 pM and 0.19 pM respectively. The data demonstrates that the heterodimeric antibody variants 2B05 and 5D03 can bind to targets EGFr & Her2, and induce strong killing of N87 cells by engaging NK cells.

### Example 10

### Alternative Variants can Also Guide Correct LC/HC Pairings

[0338] Electrostatic steering can be combined with other steering technologies. For example, replacement of one charged-residue pair in VH/VL interface with a pair of cysteine residues was explored. The pair of cysteine residues are in close proximity (4˜5.6 Å) to form disulfide bond, therefore locking the correctly paired LC/HC. Seven different combinations of charge-pair and Cys-Cys pair on the basis of variant 2B05 (Table 4) were made by transiently transfecting mammalian 2936E cells. Supernatants were separated by an SDS-PAGE gel. While the internal control C11 showed four different bands between 148 and 250 KDa, variants 2C04 and 2C06 dominantly produced the full-length IgG1; variant 2D04 which has different disulfide bonds at Q105C-A43C and G44C-G100C in separate Fab arms exclusively assembles into the full-length IgG1 antibody, implying that the combination of charge pair residues and cysteine pair residues can work cooperatively to make the correctly paired and folded heterodimeric antibody.

TABLE 4
Variants made by the combination of charge pair residues and Cysteine
pair residues in the variable regions. The residues in variable regions (VH or VL) are
numbered by Kabat numbering system while residues in constant regions (CH1 or CL) are
numbered by Eu numbering system. A Fn3 tag is inserted at the N-terminus of anti-EGFr
Ab2 HC and a Fn3-Flag-His6 tag is fused in frame to the C-terminus of anti-EGFr Ab2 LC.

| | anti-Her2 Ab1 HC | | anti-Her2 | | anti-EGFr Ab2 HC | | anti-EGFr | |
|---|---|---|---|---|---|---|---|---|
| | (K392D + K409D) | | Ab1 LC | | (E356K + D399K) | | Ab2 LC | |
| Variant | VH1 | C_{H}1 | VL1 | CL | VH2 | C_{H}1 | VL2 | CL |
| 2C04 | Q39C + Q105K | K147D | Q38C + A43D | T180K | G44D + Q105D | K147K | G100K + A43K | S131D |
| 2C05 | Q39K + Q105C | K147D | Q38D + A43C | T180K | G44D + Q105D | K147K | G100K + A43K | S131D |
| 2C06 | Q39K + Q105K | K147D | Q38D + A43D | T180K | G44C + Q105D | K147K | G100C + A43K | S131D |
| 2D01 | Q39K + Q105K | K147D | Q38D + A43D | T180K | G44D + Q105C | K147K | G100K + A43C | S131D |
| 2D02 | Q39C + Q105K | K147D | Q38C + A43D | T180K | G44C + Q105D | K147K | G100C + A43K | S131D |
| 2D03 | Q39C + Q105K | K147D | Q38C + A43D | T180K | G44D + Q105C | K147K | G100K + A43C | S131D |
| 2D04 | Q39K + Q105C | K147D | Q38D + A43C | T180K | G44C + Q105D | K147K | G100C + A43K | S131D |

[0339] Replacement of a pair of charged residues in VH/VL interface with a pair of bulky/small residues [Zamyatnin A A (1972) Prog. Biophos. Mol. Biol. 24:107-123; Chothia C (1975) J. Mol. Biol. 105:1-14] was also tested. The bulky/small residue pairs could exert a knob-into-hole effect, directing the correct LC/HC pairings in the combination of electrostatic steering mechanism. Bulky residues, for example, Tryptophan (W) has a volume of 227.8 Å3 and an Accessible Surface Area of 255 Å2; Tyrosine (Y) has a volume of 193.6 A3 and an Accessible Surface Area of 230 Å2. Small residue Alanine (A) has only a volume of 88.6 Å3 and an Accessible Surface Area of 115 Å2 while Serine (S) is similarly having a volume of 89 Å3 and an Accessible Surface Area of 115 Å2. A series of 64 variants (Table 5) on the basis of heterodimeric antibody variant 2B05 were made and tested by Western blotting. Variants 3A01, 3A02, 3A03, 3A04, 3A05, 3A06, 3B01, 3B02, 3B03, 3B04, 8A03 and 8A04 exclusively show a single band after separation by an SDS-PAGE gel, indicating that the four different chains can assemble into a full-length heterodimeric antibody. Other variants had multiple bands after separation by an SDS-PAGE gel, suggesting that these LCs could have some issues in terms of pairing with their cognate HCs.

TABLE 5
Variants made by the combination of charge pair residues and
bulky/small pair residues in the variable regions. The bulky residues here represent
Tryptophan (W) or Tyrosine (Y) while the small residues represent Alanine (A) or Serine (S).
The residues in variable regions (VH or VL) are numbered by Kabat numbering system while
residues in constant regions (CH1 or CL) are numbered by Eu numbering system. A Fn3 tag
is inserted at the N-terminus of anti-EGFr Ab2 HC and a Fn3-Flag-His6 tag is fused in frame
to the C-terminus of anti-EGFr Ab2 LC.

| | anti-Her2 Ab1 HC | | anti-Her2 | | anti-EGFr Ab2 HC | | anti-EGFr | |
|---|---|---|---|---|---|---|---|---|
| | (K392D + K409D) | | Ab1 LC | | (E356K + D399K) | | Ab2 LC | |
| Variant | VH1 | CH1 | VL1 | CL | VH2 | CH1 | VL2 | CL |
| 3A01 | Q39A + Q105K | K147D | Q38W + A43D | T180K | G44D + Q105W | K147K | G100K + A43S | S131D |
| 3A02 | Q39A + Q105K | K147D | Q38Y + A43D | T180K | G44D + Q105W | K147K | G100K + A43S | S131D |
| 3A03 | Q39S + Q105K | K147D | Q38W + A43D | T180K | G44D + Q105W | K147K | G100K + A43S | S131D |
| 3A04 | Q39S + Q105K | K147D | Q38Y + A43D | T180K | G44D + Q105W | K147K | G100K + A43S | S131D |
| 3A05 | Q39K + Q105A | K147D | Q38D + A43W | T180K | G44D + Q105W | K147K | G100K + A43S | S131D |
| 3A06 | Q39K + Q105A | K147D | Q38D + A43Y | T180K | G44D + Q105W | K147K | G100K + A43S | S131D |
| 3B01 | Q39K + Q105S | K147D | Q38D + A43W | T180K | G44D + Q105W | K147K | G100K + A43S | S131D |
| 3B02 | Q39K + Q105S | K147D | Q38D + A43Y | T180K | G44D + Q105W | K147K | G100K + A43S | S131D |
| 3B03 | Q39W + Q105K | K147D | Q38A + A43D | T180K | G44D + Q105W | K147K | G100K + A43S | S131D |
| 3B04 | Q39W + Q105K | K147D | Q38S + A43D | T180K | G44D + Q105W | K147K | G100K + A43S | S131D |
| 3B05 | Q39Y + Q105K | K147D | Q38A + A43D | T180K | G44D + Q105W | K147K | G100K + A43S | S131D |
| 3B06 | Q39Y + Q105K | K147D | Q38S + A43D | T180K | G44D + Q105W | K147K | G100K + A43S | S131D |
| 3C01 | Q39K + Q105W | K147D | Q38D + A43S | T180K | G44D + Q105W | K147K | G100K + A43S | S131D |
| 3C02 | Q39K + Q105Y | K147D | Q38D + A43S | T180K | G44D + Q105W | K147K | G100K + A43S | S131D |
| 3C03 | Q39A + Q105K | K147D | Q38W + A43D | T180K | G44D + Q105Y | K147K | G100K + A43S | S131D |
| 3C04 | Q39A + Q105K | K147D | Q38Y + A43D | T180K | G44D + Q105Y | K147K | G100K + A43S | S131D |
| 3C05 | Q39S + Q105K | K147D | Q38W + A43D | T180K | G44D + Q105Y | K147K | G100K + A43S | S131D |
| 3C06 | Q39S + Q105K | K147D | Q38Y + A43D | T180K | G44D + Q105Y | K147K | G100K + A43S | S131D |
| 3D01 | Q39K + Q105A | K147D | Q38D + A43W | T180K | G44D + Q105Y | K147K | G100K + A43S | S131D |
| 3D02 | Q39K + Q105A | K147D | Q38D + A43Y | T180K | G44D + Q105Y | K147K | G100K + A43S | S131D |
| 3D03 | Q39K + Q105S | K147D | Q38D + A43W | T180K | G44D + Q105Y | K147K | G100K + A43S | S131D |
| 3D04 | Q39K + Q105S | K147D | Q38D + A43Y | T180K | G44D + Q105Y | K147K | G100K + A43S | S131D |
| 3D05 | Q39W + Q105K | K147D | Q38A + A43D | T180K | G44D + Q105Y | K147K | G100K + A43S | S131D |
| 3D06 | Q39W + Q105K | K147D | Q38S + A43D | T180K | G44D + Q105Y | K147K | G100K + A43S | S131D |
| 4A01 | Q39Y + Q105K | K147D | Q38A + A43D | T180K | G44D + Q105Y | K147K | G100K + A43S | S131D |
| 4A02 | Q39Y + Q105K | K147D | Q38S + A43D | T180K | G44D + Q105Y | K147K | G100K + A43S | S131D |
| 4A03 | Q39K + Q105W | K147D | Q38D + A43S | T180K | G44D + Q105Y | K147K | G100K + A43S | S131D |
| 4A04 | Q39K + Q105Y | K147D | Q38D + A43S | T180K | G44D + Q105Y | K147K | G100K + A43S | S131D |
| 7A01 | Q39A + Q105K | K147D | Q38W + A43D | T180K | G44D + Q105D | K147K | G100K + A43K | S131D |
| 7A02 | Q39A + Q105K | K147D | Q38Y + A43D | T180K | G44D + Q105D | K147K | G100K + A43K | S131D |
| 7A03 | Q39S + Q105K | K147D | Q38W + A43D | T180K | G44D + Q105D | K147K | G100K + A43K | S131D |
| 7A04 | Q39S + Q105K | K147D | Q38Y + A43D | T180K | G44D + Q105D | K147K | G100K + A43K | S131D |
| 7A05 | Q39K + Q105A | K147D | Q38D + A43W | T180K | G44D + Q105D | K147K | G100K + A43K | S131D |
| 7A06 | Q39K + Q105A | K147D | Q38D + A43Y | T180K | G44D + Q105D | K147K | G100K + A43K | S131D |
| 7B01 | Q39K + Q105S | K147D | Q38D + A43W | T180K | G44D + Q105D | K147K | G100K + A43K | S131D |
| 7B02 | Q39K + Q105S | K147D | Q38D + A43Y | T180K | G44D + Q105D | K147K | G100K + A43K | S131D |
| 7B03 | Q39W + Q105K | K147D | Q38A + A43D | T180K | G44D + Q105D | K147K | G100K + A43K | S131D |
| 7B04 | Q39W + Q105K | K147D | Q38S + A43D | T180K | G44D + Q105D | K147K | G100K + A43K | S131D |
| 7B05 | Q39Y + Q105K | K147D | Q38A + A43D | T180K | G44D + Q105D | K147K | G100K + A43K | S131D |
| 7B06 | Q39Y + Q105K | K147D | Q38S + A43D | T180K | G44D + Q105D | K147K | G100K + A43K | S131D |
| 7C01 | Q39K + Q105W | K147D | Q38D + A43S | T180K | G44D + Q105D | K147K | G100K + A43K | S131D |
| 7C02 | Q39K + Q105Y | K147D | Q38D + A43S | T180K | G44D + Q105D | K147K | G100K + A43K | S131D |
| 7C03 | Q39K + Q105K | K147D | Q38D + A43D | T180K | G44A + Q105D | K147K | G100W + A43K | S131D |
| 7C04 | Q39K + Q105K | K147D | Q38D + A43D | T180K | G44A + Q105D | K147K | G100Y + A43K | S131D |
| 7C05 | Q39K + Q105K | K147D | Q38D + A43D | T180K | G44S + Q105D | K147K | G100W + A43K | S131D |
| 7C06 | Q39K + Q105K | K147D | Q38D + A43D | T180K | G44S + Q105D | K147K | G100Y + A43K | S131D |
| 7D01 | Q39K + Q105K | K147D | Q38D + A43D | T180K | G44D + Q105A | K147K | G100K + A43W | S131D |
| 7D02 | Q39K + Q105K | K147D | Q38D + A43D | T180K | G44D + Q105A | K147K | G100K + A43Y | S131D |
| 7D03 | Q39K + Q105K | K147D | Q38D + A43D | T180K | G44D + Q105S | K147K | G100K + A43W | S131D |
| 7D04 | Q39K + Q105K | K147D | Q38D + A43D | T180K | G44D + Q105S | K147K | G100K + A43Y | S131D |
| 7D05 | Q39K + Q105K | K147D | Q38D + A43D | T180K | G44W + Q105D | K147K | G100A + A43K | S131D |
| 7D06 | Q39K + Q105K | K147D | Q38D + A43D | T180K | G44W + Q105D | K147K | G100S + A43K | S131D |
| 8A01 | Q39K + Q105K | K147D | Q38D + A43D | T180K | G44Y + Q105D | K147K | G100A + A43K | S131D |
| 8A02 | Q39K + Q105K | K147D | Q38D + A43D | T180K | G44Y + Q105D | K147K | G100S + A43K | S131D |
| 8A03 | Q39K + Q105K | K147D | Q38D + A43D | T180K | G44D + Q105W | K147K | G100K + A43S | S131D |
| 8A04 | Q39K + Q105K | K147D | Q38D + A43D | T180K | G44D + Q105Y | K147K | G100K + A43S | S131D |
| 8A05 | Q39A + Q105K | K147D | Q38W + A43D | T180K | G44W + Q105D | K147K | G100A + A43K | S131D |
| 8A06 | Q39A + Q105K | K147D | Q38W + A43D | T180K | G44Y + Q105D | K147K | G100A + A43K | S131D |
| 8B01 | Q39A + Q105K | K147D | Q38W + A43D | T180K | G44W + Q105D | K147K | G100S + A43K | S131D |
| 8B02 | Q39A + Q105K | K147D | Q38W + A43D | T180K | G44Y + Q105D | K147K | G100S + A43K | S131D |
| 8B03 | Q39W + Q105K | K147D | Q38A + A43D | T180K | G44A + Q105D | K147K | G100W + A43K | S131D |
| 8B04 | Q39W + Q105K | K147D | Q38A + A43D | T180K | G44A + Q105D | K147K | G100Y + A43K | S131D |
| 8B05 | Q39Y + Q105K | K147D | Q38A + A43D | T180K | G44A + Q105D | K147K | G100W + A43K | S131D |
| 8B06 | Q39Y + Q105K | K147D | Q38A + A43D | T180K | G44A + Q105D | K147K | G100Y + A43K | S131D |

### Example 11

### Optimization of Heterodimeric Antibodies in the Absence of Tags

[0340] The tags of anti-EGFr×Her2 variants 2B05 and 5D03 were removed and tested by either transfecting mammalian 2936E cells with four DNAs to make full-length antibody, or with only two DNAs to assess the tolerance of mismatched LC/HC pairings. When all four different chains were present, both variants produced the full-length antibody with a significant amount of half-antibody. Transfections with two plasmids encoding matched LC1+HC1 or LC2+HC2 also produced the full-length homodimer antibody with a significant amount of half-antibody. When the LC2 were mispaired with their non-cognate HCl (LC2+HC1), there was small amount of products shown in the gel, whereas no products formed when LC1 was mis-paired with its non-cognate HC2 (LC1+HC2). The expression testing implied that LC2 of the anti-EGFr antibody is tolerated with HCl of the anti-Her2 antibody, while LC1 of the anti-Her2 antibody is not tolerated with HC2 of the anti-EGFr antibody. To maximize the electrostatic steering effect, a series of new variants (Table 6) were investigated by introducing charge-pair residues at the same spatial position, but with opposite polarity. The LC/HC interfaces are mutually reciprocal, either repulsive when the same polarity residues come close, or attractive when the opposite polarity residues are in proximity.

[0341] Variants V15 and V20 were mainly expressed as the intact antibody after four different chains were transcribed and translated. In the presence of matched HC/LC (i.e. LC1+HC1 or LC2+HC2), half-antibody and homodimer full-length antibody were produced. When mismatched HC/LC (e.g. LC2+HC1) were co-expressed, no product was observed, suggesting that the LC2 was not compatible with HCl. However, LC1 was tolerated by HC2 to form either half-antibody or homodimer antibody, implying that the LC1 of V15 and V20 can pair with the non-cognate HC2 and get assembled then secreted. In contrast, variants V21, V23 and V25 were mainly expressed as the intact antibody after four different chains were transcribed and translated. In the presence of matched two chains (i.e. LC1+HC1 or LC2+HC2), a full IgG antibody was produced, indicating the LCs are compatible with their cognate HCs. In the presence of mismatched LC2+HCl or LC1+HC2, no product was formed, suggesting that the LCs were not tolerated with the non-cognate HCs. Variant V22 was not as effective as V21, V23 and V25, as minor products were observed when the mismatched LCs were forced to pair with the non-cognate HCs. Mass spectrometry analysis demonstrated that variants V12, V21, V23, and V25 have the presence of four different chains (LC1+HC1+LC2+HC2) and correct LC/HC pairings (LC1+HCl and LC2+HC2).

TABLE 6
The amino acid changes in the VH/VL and CH1/CL interface of anti-
Her2 Ab1 and anti-EGFr Ab2 as heterodimeric IgG1 with mutual repulsive/attractive
mechanism. The HC of anti-Her2 Ab1 has S298T + A330M + K334V in CH2 domain and
K392D + K409D in CH3 domain; the HC of anti-EGFr Ab2 has L234Y + K209Y + Y296W in
lower hinge/CH2 domain and E356K + D399K in CH3 domain. The residues in variable
regions (VH or VL) are numbered by Kabat numbering system while residues in constant
regions (CH1 or CL) are numbered by Eu numbering system.

| | anti-Her2 Ab1 HC | | anti-Her2 | | anti-EGFr Ab2 HC | | anti-EGFr | |
|---|---|---|---|---|---|---|---|---|
| | (K392D + K409D) | | Ab1 LC | | (E356K + D399K) | | Ab2 LC | |
| Variant | VH1 | CH1 | VL1 | CL | VH2 | CH1 | VL2 | CL |
| V01 | Q39K + Q105K | K147D | Q38D + A43D | T180K | G44D + Q105D | K147K | G100K + A43K | S131D |
| V02* | Q39K + Q105C | K147D | Q38D + A43C | T180K | G44C + Q105D | K147K | G100C + A43K | S131D |
| V03 | Q39K + Q105K | P171D | Q38D + A43D | S162K | G44D + Q105D | A141K | G100K + A43K | F116D |
| V04 | Q39K + Q105K | P171D | Q38D + A43D | S162K | Q105D | A141K | A43K | F116D |
| V05 | Q39K + Q105K | P171D | Q38D + A43D | S162K | Q39D + Q105D | A141K | Q38K + A43K | F116D |
| V06 | Q39K + Q105K | K147D | Q38D + A43D | T180K | G44D + Q105D | | G100K + A43K | |
| V07 | Q39K | P171D | Q38D | S162K | Q39D | A141K | Q38K | F116D |
| V08 | Q39K | A141D | Q38D | F116K | Q39D | P171K | Q38K | S162D |
| V09 | Q39K | A141D | Q38D | F116K | Q39D | A141K | Q38K | F116D |
| V10 | Q39K | P171D | Q38D | S162K | Q39D | P171K | Q38K | S162D |
| V11 | Q105K | A141D | A43D | F116K | Q105D | A141K | A43K | F116D |
| V12 | Q105K | P171D | A43D | S162K | Q105D | P171K | A43K | S162D |
| V13 | Q105K | A141D | A43D | F116K | Q105D | P171K | A43K | S162D |
| V14 | Q105K | P171D | A43D | S162K | Q105D | A141K | A43K | F116D |
| V15 | Q39K | S183D | Q38D | S176K | Q39D | S183K | Q38K | S176D |
| V16 | Q105K | S183D | A43D | S176K | Q105D | S183K | A43K | S176D |
| V17 | Q39K | S183D | Q38D | S176K | Q105D | S183K | A43K | S176D |
| V18 | Q105K | S183D | A43D | S176K | Q39D | S183K | Q38K | S176D |
| V19 | Q39K | A141D + | Q38D | F116K + | Q39D | A141K + | Q38K | F116D + |
| | | S183K | | S176D | | S183D | | S176K |
| V20 | Q39K | A141D + | Q38D | F116K + | Q39D | A141K + | Q38K | F116D + |
| | | P171K | | S162D | | P171D | | S162K |
| V21 | Q39K + Q105K | K147D | Q38D + A43D | T180K | Q39D + Q105D | K147K | Q38K + A43K | T180D |
| V22 | Q39K + Q105K | K147D | Q38D + A43D | T180K | Q39D + Q105D | K147K | Q38K + A43K | S131D |
| V23 | Q39K + Q105K | S183D | Q38D + A43D | S176K | Q39D + Q105D | S183K | Q38K + A43K | S176D |
| V24 | Q39K + Q105K | P171D | Q38D + A43D | S162K | Q39D + Q105D | P171K | Q38K + A43K | S162D |
| V25 | G44K + Q105K | S183D | Q100D + A43D | S176K | G44D + Q105D | S183K | G100K + A43K | S176D |

### Example 12

### Optimized EGFR/Her2 Heterodimeric Antibody Variants Showed Thermal Stability

[0342] The temperature-induced unfolding of anti-EGFr IgG2, anti-Her2 IgG1, anti-Her2 defucosylated IgG1 and four anti-EGFr×Her2 heterodimeric antibody variants, under the same solvent conditions were assessed by differential scanning calorimetry (DSC). The thermogram of each protein consisted of 2 or 3 transitions. Wild-type anti-Her2 antibody showed a Tm of Fab/CH3 at 82° C. and a Tm of CH2 at 72° C.; an afucosylated version of the anti-Her2 antibody did not change the Tm of separate domains but decreased the enthalpy slightly. The anti-EGFr antibody had a similar profile of temperature-induced unfolding. All four anti-EGFr×Her2 heterodimeric antibody variants had slightly decreased Tm of CH2/CH3 at 68° C. as they all have the ADCC-enhancement substitutions in CH2 domains and heterodimerizing substitutions in the CH3 domain. In terms of Tm of Fab domains, variant V12 and V24 had the most significant decrease from 82° C. to 72° C.; variant V25 had two separate peaks at 72° C. and 78° C. while variant V23 had a single peak at 78° C. Overall, the four heterodimeric antibody variants showed good thermal stability. The data suggested the selected positions for introducing charge pair residues in the Fab regions impact on the stability of intact heterodimeric antibody to some extent, with Tm of separate domains above 68° C.

### Example 13

### Heterodimeric Antibodies Targeting Two Different Epitopes of the Same Antigen

[0343] In order to show that the same approach of making heterodimeric antibodies can be applied to different antibodies, a heterodimeric IgG was generated from two different anti-Her2 antibodies. One antibody binds to the domain IV of Her2 whereas the other binds to domain II of Her2. Variant V23 (Table 6) in which two pairs of charge residues in VH/VL and one pair of charge residues in CH1/CL were reciprocally introduced was tested by either transfecting with four DNAs to make full-length antibody, or with only two DNAs to assess the tolerance of mismatched LC/HC pairings. Similarly to anti-EGFr×Her heterodimeric antibody variant V23, the anti-Her2×Her2 heterodimeric antibody V23 was mainly expressed as the intact antibody after four different chains were translated and assembled. In the presence of two matched chains (i.e. LC1+HC1 or LC2+HC2), half-antibody and homodimer antibody were produced, indicating that the LCs are compatible with their cognate HCs. In the presence of mismatched chains LC2+HC1 or LC1+HC2, absolutely no product was formed, suggesting that the LCs were not tolerated with their non-cognate HCs.

### Example 14

### Different Combinations of Charged Residues Affect Heterodimeric Antibody Expression and LC/HC Pairings

[0344] To investigate whether different combinations of charge residues leads to different expression level or affects the LC/HC pairings, several anti-Her2×Her2 heterodimeric antibody variants were made by introducing charge pair residues with different combinations at the same locations (Table 7). While V23B had correct LC/HC pairings like V23A, but the expression level went down either in the form of intact antibody or half antibody. However, V23C and V23D tolerated the mispairing of LC/HC. All together, this set of data suggested that the electrostatic steering is not the only factor to guide the correct LC/HC pairings; other mechanisms such as shape complimentarity may play a role in the process.

TABLE 7
Comparison of different charge pair combinations at the same position of
VH/VL and CH1/CL interfaces. The residues in variable regions (VH or VL) are numbered
by Kabat numbering system while residues in constant regions (CH1 or CL) are numbered by
Eu numbering system. The HC of anti-Her2 Ab1 has ADCC-enhancement substitutions
S298T + A330M + K334V in CH2 domain and heterodimerizing changes K392D + K409D in
CH3 domain; the HC of anti-Her2 Ab2 has ADCC-enhancement substitutions
L234Y + K209Y + Y296W in lower hinge/CH2 domain and heterodimerizing changes
E356K + D399K in CH3 domain.

| | anti-Her2 Ab1 HC | | anti-Her2 | | anti-Her2 Ab2 HC | | anti-Her2 | |
|---|---|---|---|---|---|---|---|---|
| | (K392D + K409D) | | Ab1 LC | | (E356K + D399K) | | Ab2 LC | |
| Variant | VH1 | CH1 | VL1 | CL | VH2 | CH1 | VL2 | CL |
| V23A | Q39K + Q105K | S183D | Q38D + A43D | S176K | Q39D + Q105D | S183K | Q38K + A43K | S176D |
| V23B | Q39D + Q105K | S183K | Q38K + A43D | S176D | Q39K + Q105D | S183D | Q38D + A43K | S176K |
| V23C | Q39K + Q105D | S183K | Q38D + A43K | S176D | Q39D + Q105K | S183D | Q38K + A43D | S176K |
| V23D | Q39D + Q105D | S183K | Q38K + A43K | S176D | Q39K + Q105K | S183D | Q38D + A43D | S176K |

### Example 15

### Stability and Viscosity Studies

[0345] Stability studies were conducted for a compositions comprising representative heterodimeric antibodies described herein, and features of the antibody composition were compared to comparable DVD (dual variable domain) antibody compositions. Antibody samples were stored at 4° C. or 40° C. in an A52Su formulation (i.e., 10 mM Acetate, 9% Sucrose, pH 5.2) for a period of two weeks or two months. Antibody aggregation was measured as a surrogate for stability using, e.g., SE-HPLC, CEX-HPLC, HIAC (sub-visible particle), and visual inspection. The results are summarized as percent of the monomeric peak (i.e., 100% would indicate no observed aggregation) in Table 8.

TABLE 8

| | | | % monomeric |
|---|---|---|---|
| Antibody | | % monomeric peak at | peak at 40° C. |
| type | Antibody Name | 4° C. for two weeks | for two weeks |
| hetero-Ig | Ab-5-6.147v1 | 99.2 | 95.3 |
| hetero-Ig | Ab-23-6.147v1 | 99.6 | 98.0 |
| hetero-Ig | Ab-23-6.147v2 | 99.7 | 98.7 |
| hetero-Ig | Ab-5-6.37.5v1 | 99.6 | 96.1 |
| hetero-Ig | Ab-23-6.37.5v1 | 99.6 | 98.7 |
| DVD | Ab-23-6.147 | N/A | 62 |
| DVD | Ab-5-6.147 | N/A | 15 |
| DVD | Ab-23-6.37.5 | N/A | 89 |
| DVD | Ab-20C3-6.147 | N/A | 53 |

[0346] As demonstrated by the results set forth in Table 8, less than 5% of the hetero-Ig antibodies in A52Su formed aggregates when stored at 40° C. for two weeks compared to the DVD antibodies tested, where 11%-85% of the DVD antibodies in A52Su formed aggregates when stored under similar conditions. When stored at 4° C. for two weeks, less than 1% of the hetero-Ig antibodies tested formed aggregates.

[0347] A separate study was performed to investigate the relationship between viscosity and varying concentrations (70 mg/mL or 150 mg/mL) of the DVD and heterodimeric antibodies in the A52Su formulation. Viscosity was measured using a rheometer with the cone/plate geometry (RV III+ model, Brookfield Engineering Labs, Inc., Middleboro, Mass.). Sample temperature was maintained at 25° C. during measurement with a water bath. The spindle speed ranged from 15 to 125 rpm with 10 rpm increments. Data collection was carried out with Rheocalc™ software, version 2.7. The viscosity measurements of the various antibodies tested in A52Su formulations are provided below in Table 9.

TABLE 9

| | | Viscosity (cP) | Viscosity (cP) |
|---|---|---|---|
| Antibody type | Antibody Name | at 70 mg/mL | at 150 mg/mL |
| hetero-Ig | Ab-5-6.147v1 | 4.5 | 35.7 |
| hetero-Ig | Ab-23-6.147v1 | 3.5 | 15.6 |
| hetero-Ig | Ab-23-6.147v2 | 4.2 | 16.8 |
| hetero-Ig | Ab-5-6.37.5v1 | 3.1 | 51.5 |
| hetero-Ig | Ab-23-6.37.5v1 | 2.1 | 13.7 |
| DVD | Ab-23-6.147 | 4.3 | 94 |
| DVD | Ab-5-6.147 | 4.4 | 65 |
| DVD | Ab-23-6.37.5 | 4.6 | 43 |
| DVD | Ab-20C3-6.147 | 4.6 | 15 |

[0348] As shown in Table 9, the viscosity of each of the compositions comprising one of the tested heterodimeric or DVD antibodies (70 mg/mL) was less than 6 cP. When the heterodimeric antibody was present in the composition at a concentration of 150 mg/mL, three of the compositions had a viscosity of less than 17 cP. In contrast to the heterodimeric antibody formulations, only one DVD antibody formulation had a viscosity of less than 16 cP when the DVD antibody was present at a concentration of 150 mg/mL.

[0349] The foregoing Example demonstrates that the heterodimeric antibodies described herein are more stable (i.e., less than 1% of the antibody in the composition form aggregates when stored under 4° C. for two weeks) than the bispecific DVD antibodies tested. Formulations comprising such heterodimeric antibodies also met preferred viscosity specifications, and thus are particularly suitable for large scale manufacturing.

1. A heterodimeric antibody or fragment thereof comprising one or more substitutions in each of the following domains: a first CH3-domain, a second CH3-domain, a CH1-domain, a CL-domain, a VH-domain and a VL-domain,
wherein the one or more substitutions introduce charged amino acids that are electrostatically unfavorable to homodimer formation and electrostatically favorable to heterodimer formation.

2. The heterodimeric antibody or fragment thereof of claim 1, wherein the first CH3-domain or the second CH3-domain comprises an amino acid sequence differing from wild-type IgG amino acid sequence such that (a) one or more positive-charged amino acids in a wild-type human IgG amino acid sequence are replaced with one or more negative-charged amino acids or (b) one or more negative-charged amino acids in a wild-type human IgG amino acid sequence are replaced with one or more positive-charged amino acids.

3. (canceled)

4. The heterodimeric antibody or fragment thereof of claim 1, wherein the CH1-domain or the CL-domain comprises an amino acid sequence differing from wild-type IgG amino acid sequence such that (a) one or more positive-charged amino acids in wild-type IgG amino acid sequence are replaced with one or more negative-charged amino acids or (b) one or more negative-charged amino acids in wild-type IgG amino acid sequence are replaced with one or more positive-charged amino acids.

5. (canceled)

6. The heterodimeric antibody or fragment thereof of claim 1, wherein the VH-domain or the VL-domain comprises an amino acid sequence differing from wild-type IgG amino acid sequence such that (a) one or more positive-charged amino acids in wild-type IgG amino acid sequence are replaced with one or more negative-charged amino acids or (b) one or more negative-charged amino acids in wild-type IgG amino acid sequence are replaced with one or more positive-charged amino acids.

7. (canceled)

8. The heterodimeric antibody or fragment thereof of claim 1, wherein the positive-charged amino acid is selected from the group consisting of lysine, histidine and arginine.

9. The heterodimeric antibody or fragment thereof of claim 1, wherein the negative-charged amino acid is selected from the group consisting of aspartic acid and glutamic acid.

10. The heterodimeric antibody or fragment thereof of claim 1, wherein the first CH3-domain comprises a replacement of a glutamic acid with a positive-charged amino acid.

11. (canceled)

12. The heterodimeric antibody or fragment thereof of claim 1, wherein the first CH3-domain comprises a replacement of an aspartic acid with a negative-charged amino acid.

13. (canceled)

14. The heterodimeric antibody or fragment thereof of claim 1, wherein the second CH3-domain comprises a replacement of a lysine with a negative-charged amino acid.

15. (canceled)

16. The heterodimeric antibody or fragment thereof of claim 1, wherein the CH1-domain comprises a replacement of a serine with a negative-charged amino acid.

17. (canceled)

18. The heterodimeric antibody or fragment thereof of claim 1, wherein the CL-domain comprises a replacement of a serine with a positive-charged amino acid.

19. (canceled)

20. The heterodimeric antibody or fragment thereof of claim 1, wherein the VH-domain comprises a replacement of a glutamine with a negative-charged amino acid.

21. (canceled)

22. The heterodimeric antibody or fragment thereof of claim 1, wherein the VL-domain comprises a replacement of a glutamine with a positive-charged amino acid.

23. (canceled)

24. The heterodimeric antibody or fragment thereof of claim 1, that is selected from the group consisting of an antibody, a bispecific antibody, a monospecific monovalent antibody, a bispecific maxibody, a monobody, a peptibody, a bispecific peptibody, a monovalent peptibody and a receptor fusion protein.

25. A heterodimeric antibody or fragment thereof comprising a heavy chain comprising
(a) a first amino acid substitution at an AHo position selected from the group consisting of AHo positions 42-50 that introduces a charged amino acid at said position,
(b) a second amino acid substitution at a position selected from the group consisting of positions 126-213 (EU numbering) that introduces a charged amino acid at said position,
(c) a third amino acid substitution at a position selected from the group consisting of positions 352-360 (EU numbering) that introduces a charged amino acid at said position, and
(d) a fourth amino acid substitution at a position selected from the group consisting of positions 395-403 (EU numbering) that introduces a charged amino acid,
wherein the charged amino acid of (a) has the same charge as the charged amino acid of (b), and wherein the charged amino acids of (c) and (d) have an opposite charge of the charged amino acids of (a) and (b).

26. The heterodimeric antibody or fragment thereof of claim 25, wherein the first amino acid substitution is at AHo position 46, the second amino acid substitution is at EU position 183, the third amino acid substitution is at EU position 356 and the fourth amino acid substitution is at EU position 399.

27. The heterodimeric antibody or fragment thereof of claim 25, wherein glutamine at AHo position 46 is replaced with glutamic acid, serine at EU position 183 is replaced with glutamic acid, glutamic acid at EU position 356 is replaced with lysine, and aspartic acid at EU position 399 is replaced with lysine.

28. An antibody or fragment thereof comprising a heavy chain comprising
(a) a first amino acid substitution at an AHo position selected from the group consisting of AHo positions 35-43 that introduces a charged amino acid at said position,
(b) a second amino acid substitution at a position selected from the group consisting of positions 126-213 (EU numbering) that introduces a charged amino acid at said position,
(c) a third amino acid substitution at a position selected from the group consisting of positions 388-398 (EU numbering) that introduces a charged amino acid at said position, and
(d) a fourth amino acid substitution at a position selected from the group consisting of positions 404-413 (EU numbering) that introduces a charged amino acid,
wherein the charged amino acids of (c) and (d) have an opposite charge of the charged amino acids of (a) and (b).

29. The heterodimeric antibody or fragment thereof according to claim 28, wherein the first amino acid substitution is at AHo position 46, the second amino acid substitution is at EU position 183, the third amino substitution is at EU position 393 and the fourth amino acid substitution is at EU position 409.

30. The antibody or fragment thereof claim 29, wherein glutamine at AHo position 46 is replaced with lysine, serine at EU position 183 is replaced with lysine, lysine at EU position 392 is replaced with aspartic acid and lysine at EU position 409 is replaced with aspartic acid.

31. An heterodimeric antibody or fragment comprising a light chain comprising
(a) a first amino acid substitution at an AHo position selected from the group consisting of AHo positions 42-50 that introduces a charged amino acid at said position, and
(b) a second amino acid substitution at a position selected from the group consisting of positions 126-213 (EU numbering) that introduces a charged amino acid at said position.

32. The heterodimeric antibody or fragment thereof of claim 31, wherein the first amino acid substitution is at AHo position 46 and the second amino acid substitution is at EU position 176.

33. The heterodimeric antibody or fragment of claim 32, wherein glutamine at AHo position 46 is replaced with glutamic acid and serine at EU position 176 is replaced with glutamic acid.

34. The heterodimeric antibody or fragment thereof of claim 25, wherein
(a) and (b) have a negative-charge and the charged amino acids of (c) and (d) have a positive charge.

35. (canceled)

36. The antibody or fragment thereof of claim 34, comprising a light chain comprising positive-charged amino acids at AHo position 46 and EU position 176.

37. A heterodimeric antibody or fragment thereof comprising a heavy chain comprising
(a) a first amino acid substitution at an AHo position selected from the group consisting of AHo positions 42-50 that introduces a charged amino acid at said position,
(b) a second amino acid substitution at a position selected from the group consisting of positions 126-213 (EU numbering) that introduces a charged amino acid at said position,
(c) a third amino acid substitution at a position selected from the group consisting of positions 388-397 (EU numbering) that introduces a charged amino acid at said position, and
(d) a fourth amino acid substitution at a position selected from the group consisting of positions 404-413 (EU numbering) that introduces a charged amino acid,
wherein the charged amino acids of (a) and (b) have a positive-charge and the charged amino acids of (c) and (d) have a negative-charge.

38. The heterodimeric antibody or fragment thereof of claim 37, wherein the first amino acid substitution is at AHo position 46, the second amino acid substitution is at EU position 183, the third amino acid substitution is at EU position 392 and the fourth amino acid substitution is at EU position 409.

39. The heterodimeric antibody or fragment thereof of claim 37, comprising a light chain comprising negative-charged amino acids at AHo position 46 and EU position 176.

40. The heterodimeric antibody of claim 26 further comprising a second heavy chain and a first light chain and a second light chain, wherein the second heavy chain comprises amino acid substitutions at AHo position 46 and EU positions 183, 392 and 409, and wherein the first and second light chains comprise an amino acid substitution at AHo position 46 and EU position 176, wherein the amino acid substitutions introduce a charged amino acid at said positions.

41. The heterodimeric antibody of claim 40, wherein glutamine at position AHo 46 of the first heavy chain is replaced with glutamic acid, wherein glutamine at position AHo 46 of the second heavy chain is replaced with lysine, wherein glutamine at position AHo 46 of the first light chain is replaced with lysine, wherein glutamine at position AHo 46 of the second light chain is replaced with glutamic acid, wherein serine at EU position 183 of the first heavy chain is replaced with glutamic acid, wherein glutamic acid at EU position 356 of the first heavy chain is replaced with lysine, wherein glutamic acid at EU position 399 of the first heavy chain is replaced with lysine, wherein serine at EU position 183 of the second heavy chain is replaced with lysine, wherein lysine at EU position 392 of the second heavy chain is replaced with aspartic acid, and wherein lysine at EU position 409 of the second heavy chain is replaced with aspartic acid.

42. A heterodimeric antibody that binds sclerostin and DKK-1, comprising
a first heavy chain comprising a variable region amino acid sequence selected from the group consisting of SEQ ID NOs: 378 and 366 and comprising amino acid substitutions at EU positions 183, 356 and 399 of the first heavy chain,
a second heavy chain comprising a variable region amino acid sequence selected from the group consisting of SEQ ID NOs: 1003 and 974 and comprising amino acid substitutions at EU positions 183, 392 and 409 of the second heavy chain,
a first light chain comprising a variable region amino acid sequence selected from the group consisting of SEQ ID NOs: 376 and 364 and comprising an amino acid substitution at EU position 176 of the first light chain, and
a second light chain comprising a variable region amino acid sequence selected from the group consisting of SEQ ID NOs: 1002 and 978 and comprising an amino acid substitution at EU position 176 of the second light chain;
wherein the amino acid substitutions introduce a charged amino acid at said positions.

43. (canceled)

44. An antibody that binds to a region of sclerostin comprising amino acids 86-111 of SEQ ID NO: 1, wherein the antibody comprises a heavy chain having a CH3 domain comprising one or more amino acid substitutions, wherein the one or more substitutions introduce charged amino acids that are electrostatically unfavorable to homodimer formation and electrostatically favorable to heterodimer formation.

45. The antibody of claim 44, wherein a negative charged amino acid in the CH3 domain is substituted with a positive charged amino acid.

46. The antibody of claim 45, wherein the negative charged amino acid is at EU position D399, E356, or E357.

47. (canceled)

48. The antibody of claim 45, wherein the positive charged amino acid is lysine.

49. The antibody of claim 44, wherein a positive charge amino acid in the CH3 domain is substituted with a negative charged amino acid.

50. The antibody of claim 49, wherein the positive charged amino acid is at EU position K370, K392 or K409.

51. (canceled)

52. The antibody of claim 49, wherein the negative charged amino acid is aspartic acid.

53. The heterodimeric antibody of claim 40, wherein the heterodimeric antibody binds to a region of sclerostin comprising amino acids 86-111 of SEQ ID NO: 1, wherein the
first heavy chain and the first light chain comprise a sclerostin-binding portion and the second heavy chain and the second light chain comprise a DKK1-binding portion.

54. A heterodimeric antibody that binds to a region of sclerostin comprising amino acids 86-111 of SEQ ID NO: 1, the antibody comprising
a first heavy chain and a first light chain comprising a sclerostin-binding portion and a second heavy chain and a second light chain comprising a DKK1-binding portion, wherein the first heavy chain comprises amino acid substitutions at EU positions 183, 356 and 399, wherein the second heavy chain comprises amino acid substitutions at EU positions 183, 392 and 409, and wherein the first and second light chains comprise an amino acid substitution at EU position 176, wherein the amino acid substitutions introduce a charged amino acid at said positions.

55. The heterodimeric antibody of claim 1, wherein the antibody binds to a region of sclerostin comprising amino acids 86-111 of SEQ ID NO: 1.

56. The heterodimeric antibody of claim 1, that is an IgG immunoglobulin.

57. A nucleic acid comprising a nucleotide sequence encoding the heterodimeric antibody according to claim 1.

58. A vector comprising the nucleotide sequence of claim 57.

59. An isolated host cell comprising the nucleic acid of claim 57.

60. A method of increasing bone mineral density in a mammalian subject comprising administering the heterodimeric antibody of claim 1 to the subject in an amount effective to increase bone mineral density in the subject.

61. A composition comprising the antibody of claim 1 and a pharmaceutically acceptable carrier, diluent or adjuvant.

62. The composition according to claim 61, wherein less than 5% of the antibody in the composition is in aggregate form after two weeks of storage at about 4° C.

63. (canceled)

64. The composition according to claim 62, wherein an amount of antibody in the composition present in aggregate form in determined by Size Exclusion Chromatography.

65. (canceled)

66. (canceled)

67. (canceled)

The application's sequence listing, which the Patent Office published only in electronic form, follows.

SEQUENCE LISTING (1033 sequences)

SEQ ID NO: 1 - protein, 190 aa, Homo sapiens
QGWQAFKNDATEIIPELGEYPEPPPELENNKTMNRAENGGRPPHHPFETKDVSEYSCRELHFTRYVTDGPCRSAKPVTELVCSGQCGPARLLPNAIGRGKWWRPSGPDFRCIPDRYRAQRVQLLCPGGEAPRARKVRLVASCKCKRLTRFHNQSELKDFGTEAARPQKGRKPRPRARSAKANQAELENAY

SEQ ID NO: 2 - protein, 14 aa, Homo sapiens
DVSEYSCRELHFTR

SEQ ID NO: 3 - protein, 16 aa, Homo sapiens
SAKPVTELVCSGQCGP

SEQ ID NO: 4 - protein, 17 aa, Homo sapiens
WWRPSGPDFRCIPDRYR

SEQ ID NO: 5 - protein, 12 aa, Homo sapiens
LVASCKCKRLTR

SEQ ID NO: 6 - protein, 26 aa, Homo sapiens
CGPARLLPNAIGRGKWWRPSGPDFRC

SEQ ID NO: 7 - protein, 214 aa, Mus musculus
DVQMIQSPSSLSASLGDIVTMTCQASQGTSINLNWFQQKPGKAPKLLIYGSSNLEDGVPSRFSGSRYGTDFTLTISSLEDEDLATYFCLQHSYLPYTFGGGTKLEIKRADAAPTVSIFPPSSEQLTSGGASVVCFLNNFYPKDINVKWKIDGSERQNGVLNSWTDQDSKDSTYSMSSTLTLTKDEYERHNSYTCEATHKTSTSPIVKSFNRNEC

SEQ ID NO: 8 - DNA, 645 bp, Mus musculus
gatgtccagatgattcagtctccatcctccctgtctgcatctttgggagacatagtcaccatgacttgccaggcaagtcagggcactagcattaatttaaactggtttcagcaaaaaccagggaaggctcctaagctcctgatctatggttcaagcaacttggaagatggggtcccatcaaggttcagtggcagtagatatgggacagatttcactctcaccatcagcagcctggaggatgaagatctggcaacttatttctgtctacaacatagttatctcccgtacacgttcggaggggggaccaagctggaaataaaacgggctgatgctgcaccaactgtatccatcttcccaccatccagtgagcagttaacatctggaggtgcctcagtcgtgtgcttcttgaacaacttctaccccaaagacatcaatgtcaagtggaagattgatggcagtgaacgacaaaatggcgtcctgaacagttggactgatcaggacagcaaagacagcacctacagcatgagcagcaccctcacgttgaccaaggacgagtatgaacgacataacagctatacctgtgaggccactcacaagacatcaacttcacccattgtcaagagcttcaacaggaatgagtgttag

SEQ ID NO: 9 - protein, 236 aa, Mus musculus
MNTRAPAEFLGFLLLWFLGARCDVQMIQSPSSLSASLGDIVTMTCQASQGTSINLNWFQQKPGKAPKLLIYGSSNLEDGVPSRFSGSRYGTDFTLTISSLEDEDLATYFCLQHSYLPYTFGGGTKLEIKRADAAPTVSIFPPSSEQLTSGGASVVCFLNNFYPKDINVKWKIDGSERQNGVLNSWTDQDSKDSTYSMSSTLTLTKDEYERHNSYTCEATHKTSTSPIVKSFNRNEC

SEQ ID NO: 10 - DNA, 711 bp, Mus musculus
atgaacacgagggcccctgctgagttccttgggttcctgttgctctggtttttaggtgccagatgtgatgtccagatgattcagtctccatcctccctgtctgcatctttgggagacatagtcaccatgacttgccaggcaagtcagggcactagcattaatttaaactggtttcagcaaaaaccagggaaggctcctaagctcctgatctatggttcaagcaacttggaagatggggtcccatcaaggttcagtggcagtagatatgggacagatttcactctcaccatcagcagcctggaggatgaagatctggcaacttatttctgtctacaacatagttatctcccgtacacgttcggaggggggaccaagctggaaataaaacgggctgatgctgcaccaactgtatccatcttcccaccatccagtgagcagttaacatctggaggtgcctcagtcgtgtgcttcttgaacaacttctaccccaaagacatcaatgtcaagtggaagattgatggcagtgaacgacaaaatggcgtcctgaacagttggactgatcaggacagcaaagacagcacctacagcatgagcagcaccctcacgttgaccaaggacgagtatgaacgacataacagctatacctgtgaggccactcacaagacatcaacttcacccattgtcaagagcttcaacaggaatgagtgttag

SEQ ID NO: 11 - protein, 443 aa, Mus musculus
EVQLQQSGPELVTPGASVKISCKASGYTFTDHYMSWVKQSHGKSLEWIGDINPYSGETTYNQKFKGTATLTVDKSSSIAYMEIRGLTSEDSAVYYCARDDYDASPFAYWGQGTLVTVSAAKTTPPSVYPLAPGSAAQTNSMVTLGCLVKGYFPEPVTVTWNSGSLSSGVHTFPAVLQSDLYTLSSSVTVPSSTWPSETVTCNVAHPASSTKVDKKIVPRDCGCKPCICTVPEVSSVFIFPPKPKDVLTITLTPKVTCVVVDISKDDPEVQFSWFVDDVEVHTAQTQPREEQFNSTFRSVSELPIMHQDWLNGKEFKCRVNSPAFPAPIEKTISKTKGRPKAPQVYTIPPPKEQMAKDKVSLTCMITDFFPEDITVEWQWNGQPAENYKNTQPIMDTDGSYFIYSKLNVQKSNWEAGNTFTCSVLHEGLHNHHTEKSLSHSPGK

SEQ ID NO: 12 - DNA, 1332 bp, Mus musculus
gaggtccagctgcaacagtctggacctgaactggtgacgcctggggcttcagtgaagatatcttgtaaggcttctggatacacattcactgaccactacatgagctgggtgaagcagagtcatggaaaaagccttgagtggattggagatattaatccctattctggtgaaactacctacaaccagaagttcaagggcacggccacattgactgtagacaagtcttccagtatagcctacatggagatccgcggcctgacatctgaggactctgcagtctattactgtgcaagagatgattacgacgcctctccgtttgcttactggggccaagggactctggtcactgtctctgcagccaaaacgacacccccatctgtctatccactggcccctggatctgctgcccaaactaactccatggtgaccctgggatgcctggtcaagggctatttccctgagccagtgacagtgacctggaactctggatccctgtccagcggtgtgcacaccttcccagctgtcctgcagtctgacctctacactctgagcagctcagtgactgtcccctccagcacctggcccagcgagaccgtcacctgcaacgttgcccacccggccagcagcaccaaggtggacaagaaaattgtgcccagggattgtggttgtaagccttgcatatgtacagtcccagaagtatcatctgtcttcatcttccccccaaagcccaaggatgtgctcaccattactctgactcctaaggtcacgtgtgttgtggtagacatcagcaaggatgatcccgaggtccagttcagctggtttgtagatgatgtggaggtgcacacagctcagacgcaaccccgggaggagcagttcaacagcactttccgctcagtcagtgaacttcccatcatgcaccaggactggctcaatggcaaggagttcaaatgcagggtcaacagtccagctttccctgcccccatcgagaaaaccatctccaaaaccaaaggcagaccgaaggctccacaggtgtacaccattccacctcccaaggagcagatggccaaggataaagtcagtctgacctgcatgataacagacttcttccctgaagacattactgtggagtggcagtggaatgggcagccagcggagaactacaagaacactcagcccatcatggacacagatggctcttacttcatctacagcaagctcaatgtgcagaagagcaactgggaggcaggaaatactttcacctgctctgtgttacatgagggcctgcacaaccaccatactgagaagagcctctcccactctcctggtaaatga

SEQ ID NO: 13 - protein, 462 aa, Mus musculus
MRCRWIFLFLLSGTAGVLSEVQLQQSGPELVTPGASVKISCKASGYTFTDHYMSWVKQSHGKSLEWIGDINPYSGETTYNQKFKGTATLTVDKSSSIAYMEIRGLTSEDSAVYYCARDDYDASPFAYWGQGTLVTVSAAKTTPPSVYPLAPGSAAQTNSMVTLGCLVKGYFPEPVTVTWNSGSLSSGVHTFPAVLQSDLYTLSSSVTVPSSTWPSETVTCNVAHPASSTKVDKKIVPRDCGCKPCICTVPEVSSVFIFPPKPKDVLTITLTPKVTCVVVDISKDDPEVQFSWFVDDVEVHTAQTQPREEQFNSTFRSVSELPIMHQDWLNGKEFKCRVNSPAFPAPIEKTISKTKGRPKAPQVYTIPPPKEQMAKDKVSLTCMITDFFPEDITVEWQWNGQPAENYKNTQPIMDTDGSYFIYSKLNVQKSNWEAGNTFTCSVLHEGLHNHHTEKSLSHSPGK

SEQ ID NO: 14 - DNA, 1389 bp, Mus musculus
atgagatgcaggtggatctttctctttctcctgtcaggaactgcaggtgtcctctctgaggtccagctgcaacagtctggacctgaactggtgacgcctggggcttcagtgaagatatcttgtaaggcttctggatacacattcactgaccactacatgagctgggtgaagcagagtcatggaaaaagccttgagtggattggagatattaatccctattctggtgaaactacctacaaccagaagttcaagggcacggccacattgactgtagacaagtcttccagtatagcctacatggagatccgcggcctgacatctgaggactctgcagtctattactgtgcaagagatgattacgacgcctctccgtttgcttactggggccaagggactctggtcactgtctctgcagccaaaacgacacccccatctgtctatccactggcccctggatctgctgcccaaactaactccatggtgaccctgggatgcctggtcaagggctatttccctgagccagtgacagtgacctggaactctggatccctgtccagcggtgtgcacaccttcccagctgtcctgcagtctgacctctacactctgagcagctcagtgactgtcccctccagcacctggcccagcgagaccgtcacctgcaacgttgcccacccggccagcagcaccaaggtggacaagaaaattgtgcccagggattgtggttgtaagccttgcatatgtacagtcccagaagtatcatctgtcttcatcttccccccaaagcccaaggatgtgctcaccattactctgactcctaaggtcacgtgtgttgtggtagacatcagcaaggatgatcccgaggtccagttcagctggtttgtagatgatgtggaggtgcacacagctcagacgcaaccccgggaggagcagttcaacagcactttccgctcagtcagtgaacttcccatcatgcaccaggactggctcaatggcaaggagttcaaatgcagggtcaacagtccagctttccctgcccccatcgagaaaaccatctccaaaaccaaaggcagaccgaaggctccacaggtgtacaccattccacctcccaaggagcagatggccaaggataaagtcagtctgacctgcatgataacagacttcttccctgaagacattactgtggagtggcagtggaatgggcagccagcggagaactacaagaacactcagcccatcatggacacagatggctcttacttcatctacagcaagctcaatgtgcagaagagcaactgggaggcaggaaatactttcacctgctctgtgttacatgagggcctgcacaaccaccatactgagaagagcctctcccactctcctggtaaatga

SEQ ID NO: 15 - protein, 218 aa, Mus musculus
DIVLTQSPASLTVSLGLRATISCKASQSVDYDGDSYMNWYQQKPGQPPKLLIYAASNLESGIPARFSGNGSGTDFTLNIHPVEEEDAVTYYCQQSNEDPWTFGGGTKLEIKRADAAPTVSIFPPSSEQLTSGGASVVCFLNNFYPKDINVKWKIDGSERQNGVLNSWTDQDSKDSTYSMSSTLTLTKDEYERHNSYTCEATHKTSTSPIVKSFNRNEC

SEQ ID NO: 16 - DNA, 657 bp, Mus musculus
gacattgtgctgacccaatctccagcttctttgactgtgtctctaggcctgagggccaccatctcctgcaaggccagccaaagtgttgattatgatggtgatagttatatgaactggtaccagcagaaaccaggacagccacccaaactcctcatctatgctgcatccaatctagaatctgggatcccagccaggtttagtggcaatgggtctgggacagacttcaccctcaacatccatcctgtggaggaggaggatgctgtaacctattactgtcaacaaagtaatgaggatccgtggacgttcggtggaggcaccaagctggaaatcaaacgggctgatgctgcaccaactgtatccatcttcccaccatccagtgagcagttaacatctggaggtgcctcagtcgtgtgcttcttgaacaacttctaccccaaagacatcaatgtcaagtggaagattgatggcagtgaacgacaaaatggcgtcctgaacagttggactgatcaggacagcaaagacagcacctacagcatgagcagcaccctcacgttgaccaaggacgagtatgaacgacataacagctatacctgtgaggccactcacaagacatcaacttcacccattgtcaagagcttcaacaggaatgagtgttag

SEQ ID NO: 17 - protein, 238 aa, Mus musculus
METDTILLWVLLLWVPGSTGDIVLTQSPASLTVSLGLRATISCKASQSVDYDGDSYMNWYQQKPGQPPKLLIYAASNLESGIPARFSGNGSGTDFTLNIHPVEEEDAVTYYCQQSNEDPWTFGGGTKLEIKRADAAPTVSIFPPSSEQLTSGGASVVCFLNNFYPKDINVKWKIDGSERQNGVLNSWTDQDSKDSTYSMSSTLTLTKDEYERHNSYTCEATHKTSTSPIVKSFNRNEC

SEQ ID NO: 18 - DNA, 717 bp, Mus musculus
atggagacagacacaatcctgctatgggtgctgctgctctgggttccaggctccactggtgacattgtgctgacccaatctccagcttctttgactgtgtctctaggcctgagggccaccatctcctgcaaggccagccaaagtgttgattatgatggtgatagttatatgaactggtaccagcagaaaccaggacagccacccaaactcctcatctatgctgcatccaatctagaatctgggatcccagccaggtttagtggcaatgggtctgggacagacttcaccctcaacatccatcctgtggaggaggaggatgctgtaacctattactgtcaacaaagtaatgaggatccgtggacgttcggtggaggcaccaagctggaaatcaaacgggctgatgctgcaccaactgtatccatcttcccaccatccagtgagcagttaacatctggaggtgcctcagtcgtgtgcttcttgaacaacttctaccccaaagacatcaatgtcaagtggaagattgatggcagtgaacgacaaaatggcgtcctgaacagttggactgatcaggacagcaaagacagcacctacagcatgagcagcaccctcacgttgaccaaggacgagtatgaacgacataacagctatacctgtgaggccactcacaagacatcaacttcacccattgtcaagagcttcaacaggaatgagtgttag

SEQ ID NO: 19 - protein, 449 aa, Mus musculus
EVQLQQSGPELVKPGTSVKMSCKASGYTFTDCYMNWVKQSHGKSLEWIGDINPFNGGTTYNQKFKGKATLTVDKSSSTAYMQLNSLTSDDSAVYYCARSHYYFDGRVPWDAMDYWGQGTSVTVSSAKTTPPSVYPLAPGSAAQTNSMVTLGCLVKGYFPEPVTVTWNSGSLSSGVHTFPAVLQSDLYTLSSSVTVPSSTWPSETVTCNVAHPASSTKVDKKIVPRDCGCKPCICTVPEVSSVFIFPPKPKDVLTITLTPKVTCVVVDISKDDPEVQFSWFVDDVEVHTAQTQPREEQFNSTFRSVSELPIMHQDWLNGKEFKCRVNSAAFPAPIEKTISKTKGRPKAPQVYTIPPPKEQMAKDKVSLTCMITDFFPEDITVEWQWNGQPAENYKNTQPIMDTDGSYFIYSKLNVQKSNWEAGNTFTCSVLHEGLHNHHTEKSLSHSPGK

SEQ ID NO: 20 - DNA, 1350 bp, Mus musculus
gaggtccagctgcaacaatctggacctgagctggtgaagcctgggacttcagtgaagatgtcctgtaaggcttctggatacacattcactgactgctacatgaactgggtgaagcagagccatgggaagagccttgaatggattggagatattaatcctttcaacggtggtactacctacaaccagaagttcaagggcaaggccacattgactgtagacaaatcctccagcacagcctacatgcagctcaacagcctgacatctgacgactctgcagtctattactgtgcaagatcccattattacttcgatggtagagtcccttgggatgctatggactactggggtcaaggaacctcagtcaccgtctcctcagccaaaacgacacccccatctgtctatccactggcccctggatctgctgcccaaactaactccatggtgaccctgggatgcctggtcaagggctatttccctgagccagtgacagtgacctggaactctggatccctgtccagcggtgtgcacaccttcccagctgtcctgcagtctgacctctacactctgagcagctcagtgactgtcccctccagcacctggcccagcgagaccgtcacctgcaacgttgcccacccggccagcagcaccaaggtggacaagaaaattgtgcccagggattgtggttgtaagccttgcatatgtacagtcccagaagtatcatctgtcttcatcttccccccaaagcccaaggatgtgctcaccattactctgactcctaaggtcacgtgtgttgtggtagacatcagcaaggatgatcccgaggtccagttcagctggtttgtagatgatgtggaggtgcacacagctcagacgcaaccccgggaggagcagttcaacagcactttccgctcagtcagtgaacttcccatcatgcaccaggactggctcaatggcaaggagttcaaatgcagggtcaacagtgcagctttccctgcccccatcgagaaaaccatctccaaaaccaaaggcagaccgaaggctccacaggtgtacaccattccacctcccaaggagcagatggccaaggataaagtcagtctgacctgcatgataacagacttcttccctgaagacattactgtggagtggcagtggaatgggcagccagcggagaactacaagaacactcagcccatcatggacacagatggctcttacttcatctacagcaagctcaatgtgcagaagagcaactgggaggcaggaaatactttcacctgctctgtgttacatgagggcctgcacaaccaccatactgagaagagcctctcccactctcctggtaaatga

SEQ ID NO: 21 - protein, 468 aa, Mus musculus
MGWNWIFLFLLSGTAGVYSEVQLQQSGPELVKPGTSVKMSCKASGYTFTDCYMNWVKQSHGKSLEWIGDINPFNGGTTYNQKFKGKATLTVDKSSSTAYMQLNSLTSDDSAVYYCARSHYYFDGRVPWDAMDYWGQGTSVTVSSAKTTPPSVYPLAPGSAAQTNSMVTLGCLVKGYFPEPVTVTWNSGSLSSGVHTFPAVLQSDLYTLSSSVTVPSSTWPSETVTCNVAHPASSTKVDKKIVPRDCGCKPCICTVPEVSSVFIFPPKPKDVLTITLTPKVTCVVVDISKDDPEVQFSWFVDDVEVHTAQTQPREEQFNSTFRSVSELPIMHQDWLNGKEFKCRVNSAAFPAPIEKTISKTKGRPKAPQVYTIPPPKEQMAKDKVSLTCMITDFFPEDITVEWQWNGQPAENYKNTQPIMDTDGSYFIYSKLNVQKSNWEAGNTFTCSVLHEGLHNHHTEKSLSHSPGK

SEQ ID NO: 22 - DNA, 1407 bp, Mus musculus
atgggatggaactggatctttctcttcctcttgtcaggaactgcaggtgtctactctgaggtccagctgcaacaatctggacctgagctggtgaagcctgggacttcagtgaagatgtcctgtaaggcttctggatacacattcactgactgctacatgaactgggtgaagcagagccatgggaagagccttgaatggattggagatattaatcctttcaacggtggtactacctacaaccagaagttcaagggcaaggccacattgactgtagacaaatcctccagcacagcctacatgcagctcaacagcctgacatctgacgactctgcagtctattactgtgcaagatcccattattacttcgatggtagagtcccttgggatgctatggactactggggtcaaggaacctcagtcaccgtctcctcagccaaaacgacacccccatctgtctatccactggcccctggatctgctgcccaaactaactccatggtgaccctgggatgcctggtcaagggctatttccctgagccagtgacagtgacctggaactctggatccctgtccagcggtgtgcacaccttcccagctgtcctgcagtctgacctctacactctgagcagctcagtgactgtcccctccagcacctggcccagcgagaccgtcacctgcaacgttgcccacccggccagcagcaccaaggtggacaagaaaattgtgcccagggattgtggttgtaagccttgcatatgtacagtcccagaagtatcatctgtcttcatcttccccccaaagcccaaggatgtgctcaccattactctgactcctaaggtcacgtgtgttgtggtagacatcagcaaggatgatcccgaggtccagttcagctggtttgtagatgatgtggaggtgcacacagctcagacgcaaccccgggaggagcagttcaacagcactttccgctcagtcagtgaacttcccatcatgcaccaggactggctcaatggcaaggagttcaaatgcagggtcaacagtgcagctttccctgcccccatcgagaaaaccatctccaaaaccaaaggcagaccgaaggctccacaggtgtacaccattccacctcccaaggagcagatggccaaggataaagtcagtctgacctgcatgataacagacttcttccctgaagacattactgtggagtggcagtggaatgggcagccagcggagaactacaagaacactcagcccatcatggacacagatggctcttacttcatctacagcaagctcaatgtgcagaagagcaactgggaggcaggaaatactttcacctgctctgtgttacatgagggcctgcacaaccaccatactgagaagagcctctcccactctcctggtaaatga

SEQ ID NO: 23 - protein, 217 aa, Artificial Sequence
  Synthetic Polypeptide
  MISC_FEATURE: Rabbit-mouse chimera
AQVLTQTPASVSAAVGGTVTINCQSSQSVYDNNWLAWFQQKPGQPPKLLIYDASDLASGVPSRFSGSGSGTQFTLTISGVQCADAATYYCQGAYNDVIYAFGGGTEVVVKRTDAAPTVSIFPPSSEQLTSGGASVVCFLNNFYPKDINVKWKIDGSERQNGVLNSWTDQDSKDSTYSMSSTLTLTKDEYERHNSYTCEATHKTSTSPIVKSFNRNEC

SEQ ID NO: 24 - DNA, 654 bp, Artificial Sequence
  Synthetic Polynucleotide
  misc_feature: Rabbit-mouse chimera
gcgcaagtgctgacccagactccagcctccgtgtctgcagctgtgggaggcacagtcaccatcaattgccagtccagtcagagtgtttatgataacaactggttagcctggtttcagcagaaaccagggcagcctcccaagctcctgatttatgatgcatccgatctggcatctggggtcccatcgcggttcagtggcagtggatctgggacacagttcactctcaccatcagcggcgtgcagtgtgccgatgctgccacttactactgtcaaggcgcttataatgatgttatttatgctttcggcggagggaccgaggtggtggtcaaacgtacggatgctgcaccaactgtatccatcttcccaccatccagtgagcagttaacatctggaggtgcctcagtcgtgtgcttcttgaacaacttctaccccaaagacatcaatgtcaagtggaagattgatggcagtgaacgacaaaatggcgtcctgaacagttggactgatcaggacagcaaagacagcacctacagcatgagcagcaccctcacgttgaccaaggacgagtatgaacgacataacagctatacctgtgaggccactcacaagacatcaacttcacccattgtcaagagcttcaacaggaatgagtgttag

SEQ ID NO: 25 - protein, 239 aa, Artificial Sequence
  Synthetic Polypeptide
  MISC_FEATURE: Rabbit-mouse chimera
MDTRAPTQLLGLLLLWLPGATFAQVLTQTPASVSAAVGGTVTINCQSSQSVYDNNWLAWFQQKPGQPPKLLIYDASDLASGVPSRFSGSGSGTQFTLTISGVQCADAATYYCQGAYNDVIYAFGGGTEVVVKRTDAAPTVSIFPPSSEQLTSGGASVVCFLNNFYPKDINVKWKIDGSERQNGVLNSWTDQDSKDSTYSMSSTLTLTKDEYERHNSYTCEATHKTSTSPIVKSFNRNEC

SEQ ID NO: 26 - DNA, 720 bp, Artificial Sequence
  Synthetic Polypeptide
  misc_feature: Rabbit-mouse chimera
atggacacgagggcccccactcagctgctggggctcctgctgctctggctcccaggtgccacatttgcgcaagtgctgacccagactccagcctccgtgtctgcagctgtgggaggcacagtcaccatcaattgccagtccagtcagagtgtttatgataacaactggttagcctggtttcagcagaaaccagggcagcctcccaagctcctgatttatgatgcatccgatctggcatctggggtcccatcgcggttcagtggcagtggatctgggacacagttcactctcaccatcagcggcgtgcagtgtgccgatgctgccacttactactgtcaaggcgcttataatgatgttatttatgctttcggcggagggaccgaggtggtggtcaaacgtacggatgctgcaccaactgtatccatcttcccaccatccagtgagcagttaacatctggaggtgcctcagtcgtgtgcttcttgaacaacttctaccccaaagacatcaatgtcaagtggaagattgatggcagtgaacgacaaaatggcgtcctgaacagttggactgatcaggacagcaaagacagcacctacagcatgagcagcaccctcacgttgaccaaggacgagtatgaacgacataacagctatacctgtgaggccactcacaagacatcaacttcacccattgtcaagagcttcaacaggaatgagtgttag

SEQ ID NO: 27 - protein, 433 aa, Artificial Sequence
  Synthetic polynucleotide
  MISC_FEATURE: Humanized Antibody
QSLEESGGRLVTPGTPLTLTCTASGFSLSSYWMNWVRQAPGEGLEWIGTIDSGGRTDYASWAKGRFTISRTSTTMDLKMTSLTTGDTARYFCARNWNLWGQGTLVTVSSASTKGPSVYPLAPGSAAQTNSMVTLGCLVKGYFPEPVTVTWNSGSLSSGVHTFPAVLQSDLYTLSSSVTVPSSTWPSETVTCNVAHPASSTKVDKKIVPRDCGCKPCICTVPEVSSVFIFPPKPKDVLTITLTPKVTCVVVDISKDDPEVQFSWFVDDVEVHTAQTQPREEQFNSTFRSVSELPIMHQDWLNGKEFKCRVNSAAFPAPIEKTISKTKGRPKAPQVYTIPPPKEQMAKDKVSLTCMITDFFPEDITVEWQWNGQPAENYKNTQPIMNTNGSYFVYSKLNVQKSNWEAGNTFTCSVLHEGLHNHHTEKSLSHSPGK

SEQ ID NO: 28 - DNA, 1302 bp, Artificial Sequence
  Synthetic Polynucleotide
  misc_feature: Humanized Antibody
cagtcgctggaggagtccgggggtcgcctggtcacgcctgggacacccctgacactcacctgcacagcctctggattctccctcagtagttattggatgaactgggtccgccaggctccaggggaggggctggaatggatcggaaccattgattctggtggtaggacggactacgcgagctgggcaaaaggccgattcaccatctccagaacctcgactacgatggatctgaaaatgaccagtctgacgaccggggacacggcccgttatttctgtgccagaaattggaacttgtggggccaaggcaccctcgtcaccgtctcgagcgcttctacaaagggcccatctgtctatccactggcccctggatctgctgcccaaactaactccatggtgaccctgggatgcctggtcaagggctatttccctgagccagtgacagtgacctggaactctggatccctgtccagcggtgtgcacaccttcccagctgtcctgcagtctgacctctacactctgagcagctcagtgactgtcccctccagcacctggcccagcgagaccgtcacctgcaacgttgcccacccggccagcagcaccaaggtggacaagaaaattgtgcccagggattgtggttgtaagccttgcatatgtacagtcccagaagtatcatctgtcttcatcttccccccaaagcccaaggatgtgctcaccattactctgactcctaaggtcacgtgtgttgtggtagacatcagcaaggatgatcccgaggtccagttcagctggtttgtagatgatgtggaggtgcacacagctcagacgcaaccccgggaggagcagttcaacagcactttccgctcagtcagtgaacttcccatcatgcaccaggactggctcaatggcaaggagttcaaatgcagggtcaacagtgcagctttccctgcccccatcgagaaaaccatctccaaaaccaaaggcagaccgaaggctccacaggtgtacaccattccacctcccaaggagcagatggccaaggataaagtcagtctgacctgcatgataacagacttcttccctgaagacattactgtggagtggcagtggaatgggcagccagcggagaactacaagaacactcagcccatcatggacacagatggctcttacttcgtctacagcaagctcaatgtgcagaagagcaactgggaggcaggaaatactttcacctgctctgtgttacatgagggcctgcacaaccaccatactgagaagagcctctcccactctcctggtaaatga

SEQ ID NO: 29 - protein, 452 aa, Artificial Sequence
  Synthetic Polypeptide
  MISC_FEATURE: Humanized Antibody
METGLRWLLLVAVLKGVHCQSLEESGGRLVTPGTPLTLTCTASGFSLSSYWMNWVRQAPGEGLEWIGTIDSGGRTDYASWAKGRFTISRTSTTMDLKMTSLTTGDTARYFCARNWNLWGQGTLVTVSSASTKGPSVYPLAPGSAAQTNSMVTLGCLVKGYFPEPVTVTWNSGSLSSGVHTFPAVLQSDLYTLSSSVTVPSSTWPSETVTCNVAHPASSTKVDKKIVPRDCGCKPCICTVPEVSSVFIFPPKPKDVLTITLTPKVTCVVVDISKDDPEVQFSWFVDDVEVHTAQTQPREEQFNSTFRSVSELPIMHQDWLNGKEFKCRVNSAAFPAPIEKTISKTKGRPKAPQVYTIPPPKEQMAKDKVSLTCMITDFFPEDITVEWQWNGQPAENYKNTQPIMNTNGSYFVYSKLNVQKSNWEAGNTFTCSVLHEGLHNHHTEKSLSHSPGK

SEQ ID NO: 30 - DNA, 1359 bp, Artificial Sequence
  Synthetic Polynucleotide
  misc_feature: Humanized Antibody
atggagactgggctgcgctggcttctcctggtcgctgtgctcaaaggtgtccactgtcagtcgctggaggagtccgggggtcgcctggtcacgcctgggacacccctgacactcacctgcacagcctctggattctccctcagtagttattggatgaactgggtccgccaggctccaggggaggggctggaatggatcggaaccattgattctggtggtaggacggactacgcgagctgggcaaaaggccgattcaccatctccagaacctcgactacgatggatctgaaaatgaccagtctgacgaccggggacacggcccgttatttctgtgccagaaattggaacttgtggggccaaggcaccctcgtcaccgtctcgagcgcttctacaaagggcccatctgtctatccactggcccctggatctgctgcccaaactaactccatggtgaccctgggatgcctggtcaagggctatttccctgagccagtgacagtgacctggaactctggatccctgtccagcggtgtgcacaccttcccagctgtcctgcagtctgacctctacactctgagcagctcagtgactgtcccctccagcacctggcccagcgagaccgtcacctgcaacgttgcccacccggccagcagcaccaaggtggacaagaaaattgtgcccagggattgtggttgtaagccttgcatatgtacagtcccagaagtatcatctgtcttcatcttccccccaaagcccaaggatgtgctcaccattactctgactcctaaggtcacgtgtgttgtggtagacatcagcaaggatgatcccgaggtccagttcagctggtttgtagatgatgtggaggtgcacacagctcagacgcaaccccgggaggagcagttcaacagcactttccgctcagtcagtgaacttcccatcatgcaccaggactggctcaatggcaaggagttcaaatgcagggtcaacagtgcagctttccctgcccccatcgagaaaaccatctccaaaaccaaaggcagaccgaaggctccacaggtgtacaccattccacctcccaaggagcagatggccaaggataaagtcagtctgacctgcatgataacagacttcttccctgaagacattactgtggagtggcagtggaatgggcagccagcggagaactacaagaacactcagcccatcatggacacagatggctcttacttcgtctacagcaagctcaatgtgcagaagagcaactgggaggcaggaaatactttcacctgctctgtgttacatgagggcctgcacaaccaccatactgagaagagcctctcccactctcctggtaaatga

SEQ ID NO: 31 - protein, 213 aa, Mus musculus
QIVLTQSPTIVSASPGEKVTLICSASSSVSFVDWFQQKPGTSPKRWIYRTSNLGFGVPARFSGGGSGTSHSLTISRMEAEDAATYYCQQRSTYPPTFGAGTKLELKRADAAPTVSIFPPSSEQLTSGGASVVCFLNNFYPKDINVKWKIDGSERQNGVLNSWTDQDSKDSTYSMSSTLTLTKDEYERHNSYTCEATHKTSTSPIVKSFNRNEC

SEQ ID NO: 32 - DNA, 642 bp, Mus musculus
caaattgttctcacccagtctccaacaatcgtgtctgcatctccaggggagaaggtcaccctaatctgcagtgccagttcaagtgtaagtttcgtggactggttccagcagaagccaggcacttctcccaaacgctggatttacagaacatccaacctgggttttggagtccctgctcgcttcagtggcggtggatctgggacctctcactctctcacaatcagccgaatggaggctgaagatgctgccacttattactgccagcaaaggagtacttacccacccacgttcggtgctgggaccaagctggaactgaaacgggctgatgctgcaccaactgtatccatcttcccaccatccagtgagcagttaacatctggaggtgcctcagtcgtgtgcttcttgaacaacttctaccccaaagacatcaatgtcaagtggaagattgatggcagtgaacgacaaaatggcgtcctgaacagttggactgatcaggacagcaaagacagcacctacagcatgagcagcaccctcacgttgaccaaggacgagtatgaacgacataacagctatacctgtgaggccactcacaagacatcaacttcacccattgtcaagagcttcaacaggaatgagtgttag

SEQ ID NO: 33 - protein, 235 aa, Mus musculus
MHFQVQIFSFLLISASVIVSRGQIVLTQSPTIVSASPGEKVTLICSASSSVSFVDWFQQKPGTSPKRWIYRTSNLGFGVPARFSGGGSGTSHSLTISRMEAEDAATYYCQQRSTYPPTFGAGTKLELKRADAAPTVSIFPPSSEQLTSGGASVVCFLNNFYPKDINVKWKIDGSERQNGVLNSWTDQDSKDSTYSMSSTLTLTKDEYERHNSYTCEATHKTSTSPIVKSFNRNEC

SEQ ID NO: 34 - DNA, 708 bp, Mus musculus
atgcattttcaagtgcagattttcagcttcctgctaatcagtgcctcagtcatagtgtccagagggcaaattgttctcacccagtctccaacaatcgtgtctgcatctccaggggagaaggtcaccctaatctgcagtgccagttcaagtgtaagtttcgtggactggttccagcagaagccaggcacttctcccaaacgctggatttacagaacatccaacctgggttttggagtccctgctcgcttcagtggcggtggatctgggacctctcactctctcacaatcagccgaatggaggctgaagatgctgccacttattactgccagcaaaggagtacttacccacccacgttcggtgctgggaccaagctggaactgaaacgggctgatgctgcaccaactgtatccatcttcccaccatccagtgagcagttaacatctggaggtgcctcagtcgtgtgcttcttgaacaacttctaccccaaagacatcaatgtcaagtggaagattgatggcagtgaacgacaaaatggcgtcctgaacagttggactgatcaggacagcaaagacagcacctacagcatgagcagcaccctcacgttgaccaaggacgagtatgaacgacataacagctatacctgtgaggccactcacaagacatcaacttcacccattgtcaagagcttcaacaggaatgagtgttag

SEQ ID NO: 35 - protein, 449 aa, Mus musculus
QVTLKESGPGILQPSQTLSLTCSFSGFSLSTSGMGVGWIRHPSGKNLEWLAHIWWDDVKRYNPVLKSRLTISKDTSNSQVFLKIANVDTADTATYYCARIEDFDYDEEYYAMDYWGQGTSVIVSSAKTTPPSVYPLAPGSAAQTNSMVTLGCLVKGYFPEPVTVTWNSGSLSSGVHTFPAVLQSDLYTLSSSVTVPSSTWPSETVTCNVAHPASSTKVDKKIVPRDCGCKPCICTVPEVSSVFIFPPKPKDVLTITLTPKVTCVVVDISKDDPEVQFSWFVDDVEVHTAQTQPREEQFNSTFRSVSELPIMHQDWLNGKEFKCRVNSAAFPAPIEKTISKTKGRPKAPQVYTIPPPKEQMAKDKVSLTCMITDFFPEDITVEWQWNGQPAENYKNTQPIMDTDGSYFVYSKLNVQKSNWEAGNTFTCSVLHEGLHNHHTEKSLSHSPGK

SEQ ID NO: 36 - DNA, 1350 bp, Mus musculus
caggttactctgaaagagtctggccctgggatattgcagccctcccagaccctcagtctgacttgttctttctctgggttttcactgagcacttctggtatgggtgtaggctggattcgtcacccatcagggaagaatctggagtggctggcacacatttggtgggatgatgtcaagcgctataacccagtcctgaagagccgactgactatctccaaggatacctccaacagccaggtattcctcaagatcgccaatgtggacactgcagatactgccacatactactgtgctcgaatagaggactttgattacgacgaggagtattatgctatggactactggggtcaaggaacctcagtcatcgtctcctcagccaaaacgacacccccatctgtctatccactggcccctggatctgctgcccaaactaactccatggtgaccctgggatgcctggtcaagggctatttccctgagccagtgacagtgacctggaactctggatccctgtccagcggtgtgcacaccttcccagctgtcctgcagtctgacctctacactctgagcagctcagtgactgtcccctccagcacctggcccagcgagaccgtcacctgcaacgttgcccacccggccagcagcaccaaggtggacaagaaaattgtgcccagggattgtggttgtaagccttgcatatgtacagtcccagaagtatcatctgtcttcatcttccccccaaagcccaaggatgtgctcaccattactctgactcctaaggtcacgtgtgttgtggtagacatcagcaaggatgatcccgaggtccagttcagctggtttgtagatgatgtggaggtgcacacagctcagacgcaaccccgggaggagcagttcaacagcactttccgctcagtcagtgaacttcccatcatgcaccaggactggctcaatggcaaggagttcaaatgcagggtcaacagtgcagctttccctgcccccatcgagaaaaccatctccaaaaccaaaggcagaccgaaggctccacaggtgtacaccattccacctcccaaggagcagatggccaaggataaagtcagtctgacctgcatgataacagacttcttccctgaagacattactgtggagtggcagtggaatgggcagccagcggagaactacaagaacactcagcccatcatggacacagatggctcttacttcgtctacagcaagctcaatgtgcagaagagcaactgggaggcaggaaatactttcacctgctctgtgttacatgagggcctgcacaaccaccatactgagaagagcctctcccactctcctggtaaatga

SEQ ID NO: 37 - protein, 468 aa, Mus musculus
MGRLTSSFLLLIVPAYVLSQVTLKESGPGILQPSQTLSLTCSFSGFSLSTSGMGVGWIRHPSGKNLEWLAHIWWDDVKRYNPVLKSRLTISKDTSNSQVFLKIANVDTADTATYYCARIEDFDYDEEYYAMDYWGQGTSVIVSSAKTTPPSVYPLAPGSAAQTNSMVTLGCLVKGYFPEPVTVTWNSGSLSSGVHTFPAVLQSDLYTLSSSVTVPSSTWPSETVTCNVAHPASSTKVDKKIVPRDCGCKPCICTVPEVSSVFIFPPKPKDVLTITLTPKVTCVVVDISKDDPEVQFSWFVDDVEVHTAQTQPREEQFNSTFRSVSELPIMHQDWLNGKEFKCRVNSAAFPAPIEKTISKTKGRPKAPQVYTIPPPKEQMAKDKVSLTCMITDFFPEDITVEWQWNGQPAENYKNTQPIMDTDGSYFVYSKLNVQKSNWEAGNTFTCSVLHEGLHNHHTEKSLSHSPGK

SEQ ID NO: 38 - DNA, 1407 bp, Mus musculus
atgggcaggcttacttcttcattcctgctactgattgtccctgcatatgtcctgtcccaggttactctgaaagagtctggccctgggatattgcagccctcccagaccctcagtctgacttgttctttctctgggttttcactgagcacttctggtatgggtgtaggctggattcgtcacccatcagggaagaatctggagtggctggcacacatttggtgggatgatgtcaagcgctataacccagtcctgaagagccgactgactatctccaaggatacctccaacagccaggtattcctcaagatcgccaatgtggacactgcagatactgccacatactactgtgctcgaatagaggactttgattacgacgaggagtattatgctatggactactggggtcaaggaacctcagtcatcgtctcctcagccaaaacgacacccccatctgtctatccactggcccctggatctgctgcccaaactaactccatggtgaccctgggatgcctggtcaagggctatttccctgagccagtgacagtgacctggaactctggatccctgtccagcggtgtgcacaccttcccagctgtcctgcagtctgacctctacactctgagcagctcagtgactgtcccctccagcacctggcccagcgagaccgtcacctgcaacgttgcccacccggccagcagcaccaaggtggacaagaaaattgtgcccagggattgtggttgtaagccttgcatatgtacagtcccagaagtatcatctgtcttcatcttccccccaaagcccaaggatgtgctcaccattactctgactcctaaggtcacgtgtgttgtggtagacatcagcaaggatgatcccgaggtccagttcagctggtttgtagatgatgtggaggtgcacacagctcagacgcaaccccgggaggagcagttcaacagcactttccgctcagtcagtgaacttcccatcatgcaccaggactggctcaatggcaaggagttcaaatgcagggtcaacagtgcagctttccctgcccccatcgagaaaaccatctccaaaaccaaaggcagaccgaaggctccacaggtgtacaccattccacctcccaaggagcagatggccaaggataaagtcagtctgacctgcatgataacagacttcttccctgaagacattactgtggagtggcagtggaatgggcagccagcggagaactacaagaacactcagcccatcatggacacagatggctcttacttcgtctacagcaagctcaatgtgcagaagagcaactgggaggcaggaaatactttcacctgctctgtgttacatgagggcctgcacaaccaccatactgagaagagcctctcccactctcctggtaaatga

SEQ ID NO: 39 - protein, 5 aa, Mus musculus
DHYMS

SEQ ID NO: 40 - protein, 17 aa, Mus musculus
DINPYSGETTYNQKFKG

SEQ ID NO: 41 - protein, 10 aa, Mus musculus
DDYDASPFAY

SEQ ID NO: 42 - protein, 11 aa, Mus musculus
QASQGTSINLN

SEQ ID NO: 43 - protein, 7 aa, Mus musculus
GSSNLED

SEQ ID NO: 44 - protein, 9 aa, Mus musculus
LQHSYLPYT

SEQ ID NO: 45 - protein, 5 aa, Mus musculus
DCYMN

SEQ ID NO: 46 - protein, 17 aa, Mus musculus
DINPFNGGTTYNQKFKG

SEQ ID NO: 47 - protein, 16 aa, Mus musculus
SHYYFDGRVPWDAMDY

SEQ ID NO: 48 - protein, 15 aa, Mus musculus
KASQSVDYDGDSYMN

SEQ ID NO: 49 - protein, 7 aa, Mus musculus
AASNLES

SEQ ID NO: 50 - protein, 9 aa, Mus musculus
QQSNEDPWT

SEQ ID NO: 51 - protein, 5 aa, Artificial Sequence
  Synthetic Polypeptide
  MISC_FEATURE: Rabbit-mouse chimera
SYWMN

SEQ ID NO: 52 - protein, 16 aa, Artificial Sequence
  Synthetic Polypeptide
  MISC_FEATURE: Rabbit-mouse chimera
TIDSGGRTDYASWAKG

SEQ ID NO: 53 - protein, 4 aa, Artificial Sequence
  Synthetic Polypeptide
NWNL

SEQ ID NO: 54 - protein, 13 aa, Artificial Sequence
  Synthetic Polypeptide
  MISC_FEATURE: Rabbit-mouse chimera
QSSQSVYDNNWLA

SEQ ID NO: 55 - protein, 7 aa, Artificial Sequence
  Synthetic Polypeptide
  MISC_FEATURE: Rabbit-mouse chimera
DASDLAS

SEQ ID NO: 56 - protein, 10 aa, Artificial Sequence
  Synthetic Polypeptide
  MISC_FEATURE: Rabbit-mouse chimera
QGAYNDVIYA

SEQ ID NO: 57 - protein, 7 aa, Mus musculus
TSGMGVG

SEQ ID NO: 58 - protein, 16 aa, Mus musculus
HIWWDDVKRYNPVLKS

SEQ ID NO: 59 - protein, 14 aa, Mus musculus
EDFDYDEEYYAMDY

SEQ ID NO: 60 - protein, 10 aa, Mus musculus
SASSSVSFVD

SEQ ID NO: 61 - protein, 7 aa, Mus musculus
RTSNLGF

SEQ ID NO: 62 - protein, 9 aa, Mus musculus
QQRSTYPPT

SEQ ID NO: 63 - protein, 20 aa, Homo sapiens
CGPARLLPNAIGRGKWWRPS

SEQ ID NO: 64 - protein, 20 aa, Homo sapiens
GPARLLPNAIGRGKWWRPSG

SEQ ID NO: 65 - protein, 20 aa, Homo sapiens
PARLLPNAIGRGKWWRPSGP

SEQ ID NO: 66 - protein, 20 aa, Homo sapiens
ARLLPNAIGRGKWWRPSGPD

SEQ ID NO: 67 - protein, 20 aa, Homo sapiens
RLLPNAIGRGKWWRPSGPDF

SEQ ID NO: 68 - protein, 20 aa, Homo sapiens
LLPNAIGRGKWWRPSGPDFR

SEQ ID NO: 69 - protein, 20 aa, Homo sapiens
LPNAIGRGKWWRPSGPDFRC

SEQ ID NO: 70 - protein, 14 aa, Homo sapiens
SAKPVTELVCSGQC

SEQ ID NO: 71 - protein, 7 aa, Homo sapiens
LVASCKC

SEQ ID NO: 72 - protein, 8 aa, Homo sapiens
CRELHFTR

SEQ ID NO: 73 - protein, 7 aa, Homo sapiens
CIPDRYR

SEQ ID NO: 74 - DNA, 399 bp, Artificial Sequence
  Synthetic Polynucleotide
  misc_feature: Humanized Antibody Sequence
atggacacgagggcccccactcagctgctggggctcctgctgctctggctcccaggtgccacatttgctcaagttctgacccagagtccaagcagtctctccgccagcgtaggcgatcgtgtgactattacctgtcaatctagtcagagcgtgtatgataacaattggctggcgtggtaccagcaaaaaccgggcaaagccccgaagctgctcatctatgacgcgtccgatctggctagcggtgtgccaagccgtttcagtggcagtggcagcggtactgactttaccctcacaatttcgtctctccagccggaagatttcgccacttactattgtcaaggtgcttacaacgatgtgatttatgccttcggtcagggcactaaagtagaaatcaaacgt

SEQ ID NO: 75 - protein, 133 aa, Artificial Sequence
  Synthetic Polypeptide
  MISC_FEATURE: Humanized Antibody Sequence
MDTRAPTQLLGLLLLWLPGATFAQVLTQSPSSLSASVGDRVTITCQSSQSVYDNNWLAWYQQKPGKAPKLLIYDASDLASGVPSRFSGSGSGTDFTLTISSLQPEDFATYYCQGAYNDVIYAFGQGTKVEIKR

SEQ ID NO: 76 - DNA, 393 bp, Artificial Sequence
  Synthetic Polynucleotide
  misc_feature: Humanized Antibody Sequence
atggagactgggctgcgctggcttctcctggtcgctgtgctcaaaggtgtccactgtgaggtgcagctgttggagtctggaggcgggcttgtccagcctggagggagcctgcgtctctcttgtgcagcaagcggcttcagcttatcctcttactggatgaattgggtgcggcaggcacctgggaagggcctggagtgggtgggcaccattgattccggaggccgtacagactacgcgtcttgggcaaagggccgtttcaccatttcccgcgacaactccaaaaataccatgtacctccagatgaactctctccgcgcagaggacacagcacgttattactgtgcacgcaactggaatctgtggggtcaaggtactcttgtaacagtctcgagc

SEQ ID NO: 77 - protein, 131 aa, Artificial Sequence
  Synthetic Polypeptide
  MISC_FEATURE: Humanized Antibody Sequence
METGLRWLLLVAVLKGVHCEVQLLESGGGLVQPGGSLRLSCAASGFSLSSYWMNWVRQAPGKGLEWVGTIDSGGRTDYASWAKGRFTISRDNSKNTMYLQMNSLRAEDTARYYCARNWNLWGQGTLVTVSS

SEQ ID NO: 78 - protein, 11 aa, Mus musculus
RASQDISNYLN

SEQ ID NO: 79 - protein, 7 aa, Mus musculus
YTSRLLS

SEQ ID NO: 80 - protein, 9 aa, Mus musculus
QQGDTLPYT

SEQ ID NO: 81 - protein, 11 aa, Mus musculus
RASQDISNYLN

SEQ ID NO: 82 - protein, 24 aa, Rattus norvegicus
QGWQAFKNDATEIIPGLREYPEPP

SEQ ID NO: 83 - protein, 20 aa, Rattus norvegicus
TEIIPGLREYPEPPQELENN

SEQ ID NO: 84 - protein, 20 aa, Rattus norvegicus
PEPPQELENNQTMNRAENGG

SEQ ID NO: 85 - protein, 20 aa, Rattus norvegicus
ENGGRPPHHPYDTKDVSEYS

SEQ ID NO: 86 - protein, 14 aa, Rattus norvegicus
CRELHYTRFVTDGP

SEQ ID NO: 87 - protein, 25 aa, Rattus norvegicus
CRELHYTRFVTDGPSRSAKPVTELV

SEQ ID NO: 88 - protein, 23 aa, Rattus norvegicus
CRSAKPVTELVSSGQSGPRARLL

SEQ ID NO: 89 - protein, 25 aa, Rattus norvegicus
CGPARLLPNAIGRVKWWRPNGPDFR

SEQ ID NO: 90 - protein, 20 aa, Rattus norvegicus
RAQRVQLLCPGGAAPRSRKV

SEQ ID NO: 91 - protein, 16 aa, Rattus norvegicus
PGGAAPRSRKVRLVAS

SEQ ID NO: 92 - protein, 23 aa, Rattus norvegicus
KRLTRFHNQSELKDFGPETARPQ

SEQ ID NO: 93 - protein, 16 aa, Rattus norvegicus
IPDRYAQRVQLLSPGG

SEQ ID NO: 94 - protein, 24 aa, Rattus norvegicus
SELKDFGPETARPQKGRKPRPRAR

SEQ ID NO: 95 - protein, 23 aa, Rattus norvegicus
KGRKPRPRARGAKANQAELENAY

SEQ ID NO: 96 - protein, 18 aa, Rattus norvegicus
PNAIGRVKWWRPNGPDFR

SEQ ID NO: 97 - protein, 22 aa, Rattus norvegicus
KWWRPNGPDFRCIPDRYRAQRV

SEQ ID NO: 98 - protein, 213 aa, Rattus norvegicus
MQLSLAPCLACLLVHAAFVAVESQGWQAFKNDATEIIPGLREYPEPPQELENNQTMNRAENGGRPPHHPYDTKDVSEYSCRELHYTRFVTDGPCRSAKPVTELVCSGQCGPARLLPNAIGRVKWWRPNGPDFRCIPDRYRAQRVQLLCPGGAAPRSRKVRLVASCKCKRLTRFHNQSELKDFGPETARPQKGRKPRPRARGAKANQAELENAY

SEQ ID NO: 99 - protein, 7 aa, Mus musculus
YTSRLHS

SEQ ID NO: 100 - protein, 9 aa, Mus musculus
QQGDTLPYT

SEQ ID NO: 101 - protein, 11 aa, Mus musculus
RASQVITNYLY

SEQ ID NO: 102 - protein, 7 aa, Mus musculus
YTSRLHS

SEQ ID NO: 103 - protein, 9 aa, Mus musculus
QQGDTLPYT

SEQ ID NO: 104 - protein, 11 aa, Mus musculus
RASQDISNYLN

SEQ ID NO: 105 - protein, 7 aa, Mus musculus
YTSRLLS

SEQ ID NO: 106 - protein, 9 aa, Mus musculus
QQGDTLPYT

SEQ ID NO: 107 - protein, 11 aa, Mus musculus
RASQDISNYLN

SEQ ID NO: 108 - protein, 7 aa, Mus musculus
YTSRLFS

SEQ ID NO: 109 - protein, 9 aa, Mus musculus
QQGDTLPYT

SEQ ID NO: 110 - protein, 11 aa, Mus musculus
RASQDISNYLN

SEQ ID NO: 111 - protein, 7 aa, Mus musculus
YTSRLLS

SEQ ID NO: 112 - protein, 9 aa, Mus musculus
QQGDTLPYT

SEQ ID NO: 113 - protein, 11 aa, Mus musculus
RASQDISNYLN

SEQ ID NO: 114 - protein, 7 aa, Mus musculus
YTSTLQS

SEQ ID NO: 115 - protein, 9 aa, Mus musculus
QQGDTLPYT

SEQ ID NO: 116 - protein, 12 aa, Mus musculus
SVSSSISSSNLH

SEQ ID NO: 117 - protein, 213 aa, Mus musculus
QIVLSQSPAILSTSPGEKVTMTCRASSSVYYMHWYQQKPGSSPKPWIYATSNLASGVPVRFSGSGSGTSYSLTITRVEAEDAATYYCQQWSSDPLTFGAGTKLELKRADAAPTVSIFPPSSEQLTSGGASVVCFLNNFYPKDINVKWKIDGSERQNGVLNSWTDQDSKDSTYSMSSTLTLTKDEYERHNSYTCEATHKTSTSPIVKSFNRNEC

SEQ ID NO: 118 - DNA, 642 bp, Mus musculus
caaattgttctctcccagtctccagcaatcctgtctacatctccaggggagaaggtcacaatgacttgcagggccagctcaagtgtatattacatgcactggtaccagcagaagccaggatcctcccccaaaccctggatttatgccacatccaacctggcttctggagtccctgttcgcttcagtggcagtgggtctgggacctcttactctctcacaatcaccagagtggaggctgaagatgctgccacttattactgccagcagtggagtagtgacccactcacgttcggtgctgggaccaagctggagctgaaacgggctgatgctgcaccaactgtatccatcttcccaccatccagtgagcagttaacatctggaggtgcctcagtcgtgtgcttcttgaacaacttctaccccaaagacatcaatgtcaagtggaagattgatggcagtgaacgacaaaatggcgtcctgaacagttggactgatcaggacagcaaagacagcacctacagcatgagcagcaccctcacgttgaccaaggacgagtatgaacgacataacagctatacctgtgaggccactcacaagacatcaacttcacccattgtcaagagcttcaacaggaatgagtgttag

SEQ ID NO: 119 - protein, 235 aa, Mus musculus
MDFQVQIFSFLLISASVIMSRGQIVLSQSPAILSTSPGEKVTMTCRASSSVYYMHWYQQKPGSSPKPWIYATSNLASGVPVRFSGSGSGTSYSLTITRVEAEDAATYYCQQWSSDPLTFGAGTKLELKRADAAPTVSIFPPSSEQLTSGGASVVCFLNNFYPKDINVKWKIDGSERQNGVLNSWTDQDSKDSTYSMSSTLTLTKDEYERHNSYTCEATHKTSTSPIVKSFNRNEC

SEQ ID NO: 120 - DNA, 708 bp, Mus musculus
atggattttcaagtgcagattttcagcttcctgctaatcagtgcttcagtcattatgtccaggggacaaattgttctctcccagtctccagcaatcctgtctacatctccaggggagaaggtcacaatgacttgcagggccagctcaagtgtatattacatgcactggtaccagcagaagccaggatcctcccccaaaccctggatttatgccacatccaacctggcttctggagtccctgttcgcttcagtggcagtgggtctgggacctcttactctctcacaatcaccagagtggaggctgaagatgctgccacttattactgccagcagtggagtagtgacccactcacgttcggtgctgggaccaagctggagctgaaacgggctgatgctgcaccaactgtatccatcttcccaccatccagtgagcagttaacatctggaggtgcctcagtcgtgtgcttcttgaacaacttctaccccaaagacatcaatgtcaagtggaagattgatggcagtgaacgacaaaatggcgtcctgaacagttggactgatcaggacagcaaagacagcacctacagcatgagcagcaccctcacgttgaccaaggacgagtatgaacgacataacagctatacctgtgaggccactcacaagacatcaacttcacccattgtcaagagcttcaacaggaatgagtgttag

SEQ ID NO: 121 - protein, 445 aa, Mus musculus
EVQVQQSGPELVKPGASVKLSCTASGFNIKDYFIHWVKQRPEQGLEWIGRLDPEDGESDYAPKFQDKAIMTADTSSNTAYLQLRSLTSEDTAIYYCEREDYDGTYTFFPYWGQGTLVTVSAAKTTPPSVYPLAPGSAAQTNSMVTLGCLVKGYFPEPVTVTWNSGSLSSGVHTFPAVLQSDLYTLSSSVTVPSSTWPSETVTCNVAHPASSTKVDKKIVPRDCGCKPCICTVPEVSSVFIFPPKPKDVLTITLTPKVTCVVVDISKDDPEVQFSWFVDDVEVHTAQTQPREEQFNSTFRSVSELPIMHQDWLNGKEFKCRVNSAAFPAPIEKTISKTKGRPKAPQVYTIPPPKEQMAKDKVSLTCMITDFFPEDITVEWQWNGQPAENYKNTQPIMDTDGSYFIYSKLNVQKSNWEAGNTFTCSVLHEGLHNHHTEKSLSHSPGK

SEQ ID NO: 122 - DNA, 1338 bp, Mus musculus
gaggttcaggtgcagcagtctgggccagaacttgtgaagccaggggcctcagtcaagttgtcctgcacagcttctggcttcaacattaaagactactttatacactgggtgaagcagaggcctgaacagggcctggagtggattggaaggcttgatcctgaggatggtgaaagtgattatgccccgaagttccaggacaaggccattatgacagcagacacatcatccaacacagcctatcttcagctcagaagcctgacatctgaggacactgccatctattattgtgagagagaggactacgatggtacctacaccttttttccttactggggccaagggactctggtcactgtctctgcagccaaaacgacacccccatctgtctatccactggcccctggatctgctgcccaaactaactccatggtgaccctgggatgcctggtcaagggctatttccctgagccagtgacagtgacctggaactctggatccctgtccagcggtgtgcacaccttcccagctgtcctgcagtctgacctctacactctgagcagctcagtgactgtcccctccagcacctggcccagcgagaccgtcacctgcaacgttgcccacccggccagcagcaccaaggtggacaagaaaattgtgcccagggattgtggttgtaagccttgcatatgtacagtcccagaagtatcatctgtcttcatcttccccccaaagcccaaggatgtgctcaccattactctgactcctaaggtcacgtgtgttgtggtagacatcagcaaggatgatcccgaggtccagttcagctggtttgtagatgatgtggaggtgcacacagctcagacgcaaccccgggaggagcagttcaacagcactttccgctcagtcagtgaacttcccatcatgcaccaggactggctcaatggcaaggagttcaaatgcagggtcaacagtgcagctttccctgcccccatcgagaaaaccatctccaaaaccaaaggcagaccgaaggctccacaggtgtacaccattccacctcccaaggagcagatggccaaggataaagtcagtctgacctgcatgataacagacttcttccctgaagacattactgtggagtggcagtggaatgggcagccagcggagaactacaagaacactcagcccatcatggacacagatggctcttacttcatctacagcaagctcaatgtgcagaagagcaactgggaggcaggaaatactttcacctgctctgtgttacatgagggcctgcacaaccaccatactgagaagagcctctcccactctcctggtaaatga

SEQ ID NO: 123 - protein, 464 aa, Mus musculus
MKCSWVIFFLMAVVTGVNSEVQVQQSGPELVKPGASVKLSCTASGFNIKDYFIHWVKQRPEQGLEWIGRLDPEDGESDYAPKFQDKAIMTADTSSNTAYLQLRSLTSEDTAIYYCEREDYDGTYTFFPYWGQGTLVTVSAAKTTPPSVYPLAPGSAAQTNSMVTLGCLVKGYFPEPVTVTWNSGSLSSGVHTFPAVLQSDLYTLSSSVTVPSSTWPSETVTCNVAHPASSTKVDKKIVPRDCGCKPCICTVPEVSSVFIFPPKPKDVLTITLTPKVTCVVVDISKDDPEVQFSWFVDDVEVHTAQTQPREEQFNSTFRSVSELPIMHQDWLNGKEFKCRVNSAAFPAPIEKTISKTKGRPKAPQVYTIPPPKEQMAKDKVSLTCMITDFFPEDITVEWQWNGQPAENYKNTQPIMDTDGSYFIYSKLNVQKSNWEAGNTFTCSVLHEGLHNHHTEKSLSHSPGK

SEQ ID NO: 124 - DNA, 1395 bp, Mus musculus
atgaaatgcagctgggtcatcttcttcctgatggcagtggttacaggggtcaattcagaggttcaggtgcagcagtctgggccagaacttgtgaagccaggggcctcagtcaagttgtcctgcacagcttctggcttcaacattaaagactactttatacactgggtgaagcagaggcctgaacagggcctggagtggattggaaggcttgatcctgaggatggtgaaagtgattatgccccgaagttccaggacaaggccattatgacagcagacacatcatccaacacagcctatcttcagctcagaagcctgacatctgaggacactgccatctattattgtgagagagaggactacgatggtacctacaccttttttccttactggggccaagggactctggtcactgtctctgcagccaaaacgacacccccatctgtctatccactggcccctggatctgctgcccaaactaactccatggtgaccctgggatgcctggtcaagggctatttccctgagccagtgacagtgacctggaactctggatccctgtccagcggtgtgcacaccttcccagctgtcctgcagtctgacctctacactctgagcagctcagtgactgtcccctccagcacctggcccagcgagaccgtcacctgcaacgttgcccacccggccagcagcaccaaggtggacaagaaaattgtgcccagggattgtggttgtaagccttgcatatgtacagtcccagaagtatcatctgtcttcatcttccccccaaagcccaaggatgtgctcaccattactctgactcctaaggtcacgtgtgttgtggtagacatcagcaaggatgatcccgaggtccagttcagctggtttgtagatgatgtggaggtgcacacagctcagacgcaaccccgggaggagcagttcaacagcactttccgctcagtcagtgaacttcccatcatgcaccaggactggctcaatggcaaggagttcaaatgcagggtcaacagtgcagctttccctgcccccatcgagaaaaccatctccaaaaccaaaggcagaccgaaggctccacaggtgtacaccattccacctcccaaggagcagatggccaaggataaagtcagtctgacctgcatgataacagacttcttccctgaagacattactgtggagtggcagtggaatgggcagccagcggagaactacaagaacactcagcccatcatggacacagatggctcttacttcatctacagcaagctcaatgtgcagaagagcaactgggaggcaggaaatactttcacctgctctgtgttacatgagggcctgcacaaccaccatactgagaagagcctctcccactctcctggtaaatga

SEQ ID NO: 125 - protein, 215 aa, Mus musculus
EIVLTQSPALMAASPGEKVTITCSVSSTISSNHLHWFQQKSDTSPKPWIYGTSNLASGVPVRFSGSGSGTSYSLTISSMEAEDAATYYCQQWSSYPLTFGAGTKLELRRADAAPTVSIFPPSSEQLTSGGASVVCFLNNFYPKDINVKWKIDGSERQNGVLNSWTDQDSKDSTYSMSSTLTLTKDEYERHNSYTCEATHKTSTSPIVKSFNRNEC

SEQ ID NO: 126 - DNA, 648 bp, Mus musculus
gaaattgtgctcacccagtctccagcactcatggctgcatctccgggggagaaggtcaccatcacctgcagtgtcagttcaactataagttccaaccacttgcactggttccagcagaagtcagacacctcccccaaaccctggatttatggcacatccaacctggcttctggagtccctgttcgcttcagtggcagtggatctgggacctcttattctctcacaatcagcagcatggaggctgaggatgctgccacttattactgtcaacagtggagtagttacccactcacgttcggcgctgggaccaagctggagctgagacgggctgatgctgcaccaactgtatccatcttcccaccatccagtgagcagttaacatctggaggtgcctcagtcgtgtgcttcttgaacaacttctaccccaaagacatcaatgtcaagtggaagattgatggcagtgaacgacaaaatggcgtcctgaacagttggactgatcaggacagcaaagacagcacctacagcatgagcagcaccctcacgttgaccaaggacgagtatgaacgacataacagctatacctgtgaggccactcacaagacatcaacttcacccattgtcaagagcttcaacaggaatgagtgttag

SEQ ID NO: 127 - protein, 237 aa, Mus musculus
MDFHVQIFSFMLISVTVILSSGEIVLTQSPALMAASPGEKVTITCSVSSTISSNHLHWFQQKSDTSPKPWIYGTSNLASGVPVRFSGSGSGTSYSLTISSMEAEDAATYYCQQWSSYPLTFGAGTKLELRRADAAPTVSIFPPSSEQLTSGGASVVCFLNNFYPKDINVKWKIDGSERQNGVLNSWTDQDSKDSTYSMSSTLTLTKDEYERHNSYTCEATHKTSTSPIVKSFNRNEC

SEQ ID NO: 128 - DNA, 714 bp, Mus musculus
atggattttcatgtgcagattttcagcttcatgctaatcagtgtcacagtcattttgtccagtggagaaattgtgctcacccagtctccagcactcatggctgcatctccgggggagaaggtcaccatcacctgcagtgtcagttcaactataagttccaaccacttgcactggttccagcagaagtcagacacctcccccaaaccctggatttatggcacatccaacctggcttctggagtccctgttcgcttcagtggcagtggatctgggacctcttattctctcacaatcagcagcatggaggctgaggatgctgccacttattactgtcaacagtggagtagttacccactcacgttcggcgctgggaccaagctggagctgagacgggctgatgctgcaccaactgtatccatcttcccaccatccagtgagcagttaacatctggaggtgcctcagtcgtgtgcttcttgaacaacttctaccccaaagacatcaatgtcaagtggaagattgatggcagtgaacgacaaaatggcgtcctgaacagttggactgatcaggacagcaaagacagcacctacagcatgagcagcaccctcacgttgaccaaggacgagtatgaacgacataacagctatacctgtgaggccactcacaagacatcaacttcacccattgtcaagagcttcaacaggaatgagtgttag

SEQ ID NO: 129 - protein, 449 aa, Mus musculus
EVQLQQSGAELVRPGALVKLSCTASDFNIKDFYLHWMRQRPEQGLDWIGRIDPENGDTLYDPKFQDKATLTTDTSSNTAYLQLSGLTSETTAVYYCSREADYFHDGTSYWYFDVWGAGTTITVSSAKTTPPSVYPLAPGSAAQTNSMVTLGCLVKGYFPEPVTVTWNSGSLSSGVHTFPAVLQSDLYTLSSSVTVPSSTWPSETVTCNVAHPASSTKVDKKIVPRDCGCKPCICTVPEVSSVFIFPPKPKDVLTITLTPKVTCVVVDISKDDPEVQFSWFVDDVEVHTAQTQPREEQFNSTFRSVSELPIMHQDWLNGKEFKCRVNSAAFPAPIEKTISKTKGRPKAPQVYTIPPPKEQMAKDKVSLTCMITDFFPEDITVEWQWNGQPAENYKNTQPIMDTDGSYFIYSKLNVQKSNWEAGNTFTCSVLHEGLHNHHTEKSLSHSPGK

SEQ ID NO: 130 - DNA, 1350 bp, Mus musculus
gaggttcagctgcagcagtctggggctgaacttgtgaggccaggggccttagtcaagttgtcctgcacagcttctgacttcaacattaaagacttctatctacactggatgaggcagcggcctgaacagggcctggactggattggaaggattgatcctgagaatggtgatactttatatgacccgaagttccaggacaaggccactcttacaacagacacatcctccaacacagcctacctgcagctcagcggcctgacatctgagaccactgccgtctattactgttctagagaggcggattatttccacgatggtacctcctactggtacttcgatgtctggggcgcagggaccacaatcaccgtctcctcagccaaaacgacacccccatctgtctatccactggcccctggatctgctgcccaaactaactccatggtgaccctgggatgcctggtcaagggctatttccctgagccagtgacagtgacctggaactctggatccctgtccagcggtgtgcacaccttcccagctgtcctgcagtctgacctctacactctgagcagctcagtgactgtcccctccagcacctggcccagcgagaccgtcacctgcaacgttgcccacccggccagcagcaccaaggtggacaagaaaattgtgcccagggattgtggttgtaagccttgcatatgtacagtcccagaagtatcatctgtcttcatcttccccccaaagcccaaggatgtgctcaccattactctgactcctaaggtcacgtgtgttgtggtagacatcagcaaggatgatcccgaggtccagttcagctggtttgtagatgatgtggaggtgcacacagctcagacgcaaccccgggaggagcagttcaacagcactttccgctcagtcagtgaacttcccatcatgcaccaggactggctcaatggcaaggagttcaaatgcagggtcaacagtgcagctttccctgcccccatcgagaaaaccatctccaaaaccaaaggcagaccgaaggctccacaggtgtacaccattccacctcccaaggagcagatggccaaggataaagtcagtctgacctgcatgataacagacttcttccctgaagacattactgtggagtggcagtggaatgggcagccagcggagaactacaagaacactcagcccatcatggacacagatggctcttacttcatctacagcaagctcaatgtgcagaagagcaactgggaggcaggaaatactttcacctgctctgtgttacatgagggcctgcacaaccaccatactgagaagagcctctcccactctcctggtaaatga

SEQ ID NO: 131 - protein, 468 aa, Mus musculus
MKCSWVIFFLMAVVTGVNSEVQLQQSGAELVRPGALVKLSCTASDFNIKDFYLHWMRQRPEQGLDWIGRIDPENGDTLYDPKFQDKATLTTDTSSNTAYLQLSGLTSETTAVYYCSREADYFHDGTSYWYFDVWGAGTTITVSSAKTTPPSVYPLAPGSAAQTNSMVTLGCLVKGYFPEPVTVTWNSGSLSSGVHTFPAVLQSDLYTLSSSVTVPSSTWPSETVTCNVAHPASSTKVDKKIVPRDCGCKPCICTVPEVSSVFIFPPKPKDVLTITLTPKVTCVVVDISKDDPEVQFSWFVDDVEVHTAQTQPREEQFNSTFRSVSELPIMHQDWLNGKEFKCRVNSAAFPAPIEKTISKTKGRPKAPQVYTIPPPKEQMAKDKVSLTCMITDFFPEDITVEWQWNGQPAENYKNTQPIMDTDGSYFIYSKLNVQKSNWEAGNTFTCSVLHEGLHNHHTEKSLSHSPGK

SEQ ID NO: 132 - DNA, 1407 bp, Mus musculus
atgaaatgcagctgggtcatcttcttcctgatggcagtggttacaggggtcaattcagaggttcagctgcagcagtctggggctgaacttgtgaggccaggggccttagtcaagttgtcctgcacagcttctgacttcaacattaaagacttctatctacactggatgaggcagcggcctgaacagggcctggactggattggaaggattgatcctgagaatggtgatactttatatgacccgaagttccaggacaaggccactcttacaacagacacatcctccaacacagcctacctgcagctcagcggcctgacatctgagaccactgccgtctattactgttctagagaggcggattatttccacgatggtacctcctactggtacttcgatgtctggggcgcagggaccacaatcaccgtctcctcagccaaaacgacacccccatctgtctatccactggcccctggatctgctgcccaaactaactccatggtgaccctgggatgcctggtcaagggctatttccctgagccagtgacagtgacctggaactctggatccctgtccagcggtgtgcacaccttcccagctgtcctgcagtctgacctctacactctgagcagctcagtgactgtcccctccagcacctggcccagcgagaccgtcacctgcaacgttgcccacccggccagcagcaccaaggtggacaagaaaattgtgcccagggattgtggttgtaagccttgcatatgtacagtcccagaagtatcatctgtcttcatcttccccccaaagcccaaggatgtgctcaccattactctgactcctaaggtcacgtgtgttgtggtagacatcagcaaggatgatcccgaggtccagttcagctggtttgtagatgatgtggaggtgcacacagctcagacgcaaccccgggaggagcagttcaacagcactttccgctcagtcagtgaacttcccatcatgcaccaggactggctcaatggcaaggagttcaaatgcagggtcaacagtgcagctttccctgcccccatcgagaaaaccatctccaaaaccaaaggcagaccgaaggctccacaggtgtacaccattccacctcccaaggagcagatggccaaggataaagtcagtctgacctgcatgataacagacttcttccctgaagacattactgtggagtggcagtggaatgggcagccagcggagaactacaagaacactcagcccatcatggacacagatggctcttacttcatctacagcaagctcaatgtgcagaagagcaactgggaggcaggaaatactttcacctgctctgtgttacatgagggcctgcacaaccaccatactgagaagagcctctcccactctcctggtaaatga

SEQ ID NO: 133 - protein, 214 aa, Mus musculus
DIQMTQITSSLSASLGDRVSISCRASQDISNYLNWYQQKPDGTFKLLIFYTSRLLSGVPSRFSGSGSGTDYSLTIYNLEQEDFATYFCQQGDTLPYTFGGGTKLEIKRADAAPTVSIFPPSSEQLTSGGASVVCFLNNFYPKDINVKWKIDGSERQNGVLNSWTDQDSKDSTYSMSSTLTLTKDEYERHNSYTCEATHKTSTSPIVKSFNRNEC

SEQ ID NO: 134 - DNA, 645 bp, Mus musculus
gatatccagatgacacagattacatcctccctgtctgcctctctgggagacagggtctccatcagttgcagggcaagtcaagacattagcaattatttaaactggtatcagcagaaaccagatggaacttttaaactccttatcttctacacatcaagattactctcaggagtcccatcaaggttcagtggcagtgggtctggaacagattattctctcaccatttacaacctggagcaagaagattttgccacttacttttgccaacagggagatacgcttccgtacactttcggaggggggaccaagctggaaataaaacgggctgatgctgcaccaactgtatccatcttcccaccatccagtgagcagttaacatctggaggtgcctcagtcgtgtgcttcttgaacaacttctaccccaaagacatcaatgtcaagtggaagattgatggcagtgaacgacaaaatggcgtcctgaacagttggactgatcaggacagcaaagacagcacctacagcatgagcagcaccctcacgttgaccaaggacgagtatgaacgacataacagctatacctgtgaggccactcacaagacatcaacttcacccattgtcaagagcttcaacaggaatgagtgttag

SEQ ID NO: 135 - protein, 234 aa, Mus musculus
MMSSAQFLGLLLLCFQGTRCDIQMTQITSSLSASLGDRVSISCRASQDISNYLNWYQQKPDGTFKLLIFYTSRLLSGVPSRFSGSGSGTDYSLTIYNLEQEDFATYFCQQGDTLPYTFGGGTKLEIKRADAAPTVSIFPPSSEQLTSGGASVVCFLNNFYPKDINVKWKIDGSERQNGVLNSWTDQDSKDSTYSMSSTLTLTKDEYERHNSYTCEATHKTSTSPIVKSFNRNEC

SEQ ID NO: 136 - DNA, 705 bp, Mus musculus
atgatgtcctctgctcagttccttggtctcctgttgctctgttttcaaggtaccagatgtgatatccagatgacacagattacatcctccctgtctgcctctctgggagacagggtctccatcagttgcagggcaagtcaagacattagcaattatttaaactggtatcagcagaaaccagatggaacttttaaactccttatcttctacacatcaagattactctcaggagtcccatcaaggttcagtggcagtgggtctggaacagattattctctcaccatttacaacctggagcaagaagattttgccacttacttttgccaacagggagatacgcttccgtacactttcggaggggggaccaagctggaaataaaacgggctgatgctgcaccaactgtatccatcttcccaccatccagtgagcagttaacatctggaggtgcctcagtcgtgtgcttcttgaacaacttctaccccaaagacatcaatgtcaagtggaagattgatggcagtgaacgacaaaatggcgtcctgaacagttggactgatcaggacagcaaagacagcacctacagcatgagcagcaccctcacgttgaccaaggacgagtatgaacgacataacagctatacctgtgaggccactcacaagacatcaacttcacccattgtcaagagcttcaacaggaatgagtgttag

SEQ ID NO: 137 - protein, 447 aa, Mus musculus
EVQLQQSGPELMKPGASVKMSCKASGYTFTDYNMHWVKQNQGKTLEWIGEINPNSGGAGYNQKFKGKATLTVDKSSTTAYMELRSLTSEDSAVYYCARLGYDDIYDDWYFDVWGAGTTVTVSSAKTTPPSVYPLAPGSAAQTNSMVTLGCLVKGYFPEPVTVTWNSGSLSSGVHTFPAVLQSDLYTLSSSVTVPSSTWPSETVTCNVAHPASSTKVDKKIVPRDCGCKPCICTVPEVSSVFIFPPKPKDVLTITLTPKVTCVVVDISKDDPEVQFSWFVDDVEVHTAQTQPREEQFNSTFRSVSELPIMHQDWLNGKEFKCRVNSAAFPAPIEKTISKTKGRPKAPQVYTIPPPKEQMAKDKVSLTCMITDFFPEDITVEWQWNGQPAENYKNTQPIMDTDGSYFIYSKLNVQKSNWEAGNTFTCSVLHEGLHNHHTEKSLSHSPGK

SEQ ID NO: 138 - DNA, 1344 bp, Mus musculus
gaggtccaactgcaacagtctggacctgaactaatgaagcctggggcttcagtgaagatgtcctgcaaggcttctggatatacattcactgactacaacatgcactgggtgaagcagaaccaaggaaagaccctagagtggataggagaaattaatcctaacagtggtggtgctggctacaaccagaagttcaagggcaaggccacattgactgtagacaagtcctccaccacagcctacatggagctccgcagcctgacatctgaggactctgcagtctattactgtgcaagattgggctacgatgatatctacgacgactggtacttcgatgtctggggcgcagggaccacggtcaccgtctcctcagccaaaacgacacccccatctgtctatccactggcccctggatctgctgcccaaactaactccatggtgaccctgggatgcctggtcaagggctatttccctgagccagtgacagtgacctggaactctggatccctgtccagcggtgtgcacaccttcccagctgtcctgcagtctgacctctacactctgagcagctcagtgactgtcccctccagcacctggcccagcgagaccgtcacctgcaacgttgcccacccggccagcagcaccaaggtggacaagaaaattgtgcccagggattgtggttgtaagccttgcatatgtacagtcccagaagtatcatctgtcttcatcttccccccaaagcccaaggatgtgctcaccattactctgactcctaaggtcacgtgtgttgtggtagacatcagcaaggatgatcccgaggtccagttcagctggtttgtagatgatgtggaggtgcacacagctcagacgcaaccccgggaggagcagttcaacagcactttccgctcagtcagtgaacttcccatcatgcaccaggactggctcaatggcaaggagttcaaatgcagggtcaacagtgcagctttccctgcccccatcgagaaaaccatctccaaaaccaaaggcagaccgaaggctccacaggtgtacaccattccacctcccaaggagcagatggccaaggataaagtcagtctgacctgcatgataacagacttcttccctgaagacattactgtggagtggcagtggaatgggcagccagcggagaactacaagaacactcagcccatcatggacacagatggctcttacttcatctacagcaagctcaatgtgcagaagagcaactgggaggcaggaaatactttcacctgctctgtgttacatgagggcctgcacaaccaccatactgagaagagcctctcccactctcctggtaaatga

SEQ ID NO: 139 - protein, 466 aa, Mus musculus
MGWSWTFLFLLSGTAGVLSEVQLQQSGPELMKPGASVKMSCKASGYTFTDYNMHWVKQNQGKTLEWIGEINPNSGGAGYNQKFKGKATLTVDKSSTTAYMELRSLTSEDSAVYYCARLGYDDIYDDWYFDVWGAGTTVTVSSAKTTPPSVYPLAPGSAAQTNSMVTLGCLVKGYFPEPVTVTWNSGSLSSGVHTFPAVLQSDLYTLSSSVTVPSSTWPSETVTCNVAHPASSTKVDKKIVPRDCGCKPCICTVPEVSSVFIFPPKPKDVLTITLTPKVTCVVVDISKDDPEVQFSWFVDDVEVHTAQTQPREEQFNSTFRSVSELPIMHQDWLNGKEFKCRVNSAAFPAPIEKTISKTKGRPKAPQVYTIPPPKEQMAKDKVSLTCMITDFFPEDITVEWQWNGQPAENYKNTQPIMDTDGSYFIYSKLNVQKSNWEAGNTFTCSVLHEGLHNHHTEKSLSHSPGK

SEQ ID NO: 140 - DNA, 1401 bp, Mus musculus
atgggatggagctggacctttctcttcctcctgtcaggaactgcaggtgtcctctctgaggtccaactgcaacagtctggacctgaactaatgaagcctggggcttcagtgaagatgtcctgcaaggcttctggatatacattcactgactacaacatgcactgggtgaagcagaaccaaggaaagaccctagagtggataggagaaattaatcctaacagtggtggtgctggctacaaccagaagttcaagggcaaggccacattgactgtagacaagtcctccaccacagcctacatggagctccgcagcctgacatctgaggactctgcagtctattactgtgcaagattgggctacgatgatatctacgacgactggtacttcgatgtctggggcgcagggaccacggtcaccgtctcctcagccaaaacgacacccccatctgtctatccactggcccctggatctgctgcccaaactaactccatggtgaccctgggatgcctggtcaagggctatttccctgagccagtgacagtgacctggaactctggatccctgtccagcggtgtgcacaccttcccagctgtcctgcagtctgacctctacactctgagcagctcagtgactgtcccctccagcacctggcccagcgagaccgtcacctgcaacgttgcccacccggccagcagcaccaaggtggacaagaaaattgtgcccagggattgtggttgtaagccttgcatatgtacagtcccagaagtatcatctgtcttcatcttccccccaaagcccaaggatgtgctcaccattactctgactcctaaggtcacgtgtgttgtggtagacatcagcaaggatgatcccgaggtccagttcagctggtttgtagatgatgtggaggtgcacacagctcagacgcaaccccgggaggagcagttcaacagcactttccgctcagtcagtgaacttcccatcatgcaccaggactggctcaatggcaaggagttcaaatgcagggtcaacagtgcagctttccctgcccccatcgagaaaaccatctccaaaaccaaaggcagaccgaaggctccacaggtgtacaccattccacctcccaaggagcagatggccaaggataaagtcagtctgacctgcatgataacagacttcttccctgaagacattactgtggagtggcagtggaatgggcagccagcggagaactacaagaacactcagcccatcatggacacagatggctcttacttcatctacagcaagctcaatgtgcagaagagcaactgggaggcaggaaatactttcacctgctctgtgttacatgagggcctgcacaaccaccatactgagaagagcctctcccactctcctggtaaatga

SEQ ID NO: 141 - protein, 214 aa, Artificial Sequence
  Synthetic Polypeptide
  MISC_FEATURE: Humanized Antibody Sequence
DIQMTQSPSSLSASVGDRVTITCRASQDISNYLNWYQQKPGKAPKLLIYYTSRLLSGVPSRFSGSGSGTDFTLTISSLQPEDFATYYCQQGDTLPYTFGGGTKVEIKRTVAAPSVFIFPPSDEQLKSGTASVVCLLNNFYPREAKVQWKVDNALQSGNSQESVTEQDSKDSTYSLSSTLTLSKADYEKHKVYACEVTHQGLSSPVTKSFNRGEC

SEQ ID NO: 142 - DNA, 642 bp, Artificial Sequence
  Synthetic Polynucleotide
  misc_feature: Humanized Antibody Sequence
gacatccagatgacccagtctccatcctccctctccgcatccgtaggcgaccgcgtaaccataacatgtagagcatctcaagatatttccaactatttgaattggtaccaacaaaaacccggcaaagcacctaaactcctcatttactatacatcaagactcctctccggcgttccatcacgattctcaggctccggctccggcacagatttcacactcactatttcctccctccaaccagaagattttgcaacctattactgtcaacaaggcgatacactcccatacacattcggcggcggcacaaaagttgaaattaaacgtacggtggctgcaccatctgtcttcatcttcccgccatctgatgagcagttgaaatctggaactgcctctgttgtgtgcctgctgaataacttctatcccagagaggccaaagtacagtggaaggtggataacgccctccaatcgggtaactcccaggagagtgtcacagagcaggacagcaaggacagcacctacagcctcagcagcaccctgacgctgagcaaagcagactacgagaaacacaaagtctacgcctgcgaagtcacccatcagggcctgagctcgcccgtcacaaagagcttcaacaggggagagtgt

SEQ ID NO: 143 - protein, 236 aa, Artificial Sequence
  Synthetic Polypeptide
  MISC_FEATURE: Humanized Antibody Sequence
MDMRVPAQLLGLLLLWLRGARCDIQMTQSPSSLSASVGDRVTITCRASQDISNYLNWYQQKPGKAPKLLIYYTSRLLSGVPSRFSGSGSGTDFTLTISSLQPEDFATYYCQQGDTLPYTFGGGTKVEIKRTVAAPSVFIFPPSDEQLKSGTASVVCLLNNFYPREAKVQWKVDNALQSGNSQESVTEQDSKDSTYSLSSTLTLSKADYEKHKVYACEVTHQGLSSPVTKSFNRGEC

SEQ ID NO: 144 - DNA, 708 bp, Artificial Sequence
  Synthetic Polynucleotide
  misc_feature: Humanized Antibody Sequence
atggacatgagggtccccgctcagctcctggggctcctgctactctggctccgaggtgccagatgtgacatccagatgacccagtctccatcctccctctccgcatccgtaggcgaccgcgtaaccataacatgtagagcatctcaagatatttccaactatttgaattggtaccaacaaaaacccggcaaagcacctaaactcctcatttactatacatcaagactcctctccggcgttccatcacgattctcaggctccggctccggcacagatttcacactcactatttcctccctccaaccagaagattttgcaacctattactgtcaacaaggcgatacactcccatacacattcggcggcggcacaaaagttgaaattaaacgtacggtggctgcaccatctgtcttcatcttcccgccatctgatgagcagttgaaatctggaactgcctctgttgtgtgcctgctgaataacttctatcccagagaggccaaagtacagtggaaggtggataacgccctccaatcgggtaactcccaggagagtgtcacagagcaggacagcaaggacagcacctacagcctcagcagcaccctgacgctgagcaaagcagactacgagaaacacaaagtctacgcctgcgaagtcacccatcagggcctgagctcgcccgtcacaaagagcttcaacaggggagagtgt

SEQ ID NO: 145 - protein, 449 aa, Artificial Sequence
  Synthetic Polypeptide
  MISC_FEATURE: Humanized Antibody Sequence
EVQLVQSGAEVKKPGASVKVSCKASGYTFTDYNMHWVRQAPGQGLEWMGEINPNSGGAGYNQKFKGRVTMTTDTSTSTAYMELRSLRSDDTAVYYCARLGYDDIYDDWYFDVWGQGTTVTVSSASTKGPSVFPLAPCSRSTSESTAALGCLVKDYFPEPVTVSWNSGALTSGVHTFPAVLQSSGLYSLSSVVTVPSSNFGTQTYTCNVDHKPSNTKVDKTVERKCCVECPPCPAPPVAGPSVFLFPPKPKDTLMISRTPEVTCVVVDVSHEDPEVQFNWYVDGVEVHNAKTKPREEQFNSTFRVVSVLTVVHQDWLNGKEYKCKVSNKGLPAPIEKTISKTKGQPREPQVYTLPPSREEMTKNQVSLTCLVKGFYPSDIAVEWESNGQPENNYKTTPPMLDSDGSFFLYSKLTVDKSRWQQGNVFSCSVMHEALHNHYTQKSLSLSPGK

SEQ ID NO: 146 - DNA, 1347 bp, Artificial Sequence
  Synthetic Polynucleotide
  misc_feature: Humanized Antibody Sequence
gaggtgcagctggtgcagagcggcgccgaggtaaaaaaaccaggagcaagcgttaaagtttcttgtaaagcaagcggatatacatttacagattacaacatgcattgggtaagacaagcgccaggacaaggattggaatggatgggcgaaattaaccctaatagtggaggagcaggctacaatcaaaaattcaaagggagagttacaatgacaacagacacaagcacttcaacagcatatatggaactgcgatcacttagaagcgacgatacagctgtatactattgcgcacgacttgggtatgatgatatatatgatgactggtatttcgatgtttggggccagggaacaacagttaccgtctctagtgcctccaccaagggcccatcggtcttccccctggcgccctgctccaggagcacctccgagagcacagcggccctgggctgcctggtcaaggactacttccccgaaccggtgacggtgtcgtggaactcaggcgctctgaccagcggcgtgcacaccttcccagctgtcctacagtcctcaggactctactccctcagcagcgtggtgaccgtgccctccagcaacttcggcacccagacctacacctgcaacgtagatcacaagcccagcaacaccaaggtggacaagacagttgagcgcaaatgttgtgtcgagtgcccaccgtgcccagcaccacctgtggcaggaccgtcagtcttcctcttccccccaaaacccaaggacaccctcatgatctcccggacccctgaggtcacgtgcgtggtggtggacgtgagccacgaagaccccgaggtccagttcaactggtacgtggacggcgtggaggtgcataatgccaagacaaagccacgggaggagcagttcaacagcacgttccgtgtggtcagcgtcctcaccgttgtgcaccaggactggctgaacggcaaggagtacaagtgcaaggtctccaacaaaggcctcccagcccccatcgagaaaaccatctccaaaaccaaagggcagccccgagaaccacaggtgtacaccctgcccccatcccgggaggagatgaccaagaaccaggtcagcctgacctgcctggtcaaaggcttctaccccagcgacatcgccgtggagtgggagagcaatgggcagccggagaacaactacaagaccacacctcccatgctggactccgacggctccttcttcctctacagcaagctcaccgtggacaagagcaggtggcagcaggggaacgtcttctcatgctccgtgatgcatgaggctctgcacaaccactacacgcagaagagcctctccctgtctccgggtaaa

SEQ ID NO: 147 - protein, 468 aa, Artificial Sequence
  Synthetic Polypeptide
  MISC_FEATURE: Humanized Antibody Sequence
MDWTWRILFLVAAATGAHSEVQLVQSGAEVKKPGASVKVSCKASGYTFTDYNMHWVRQAPGQGLEWMGEINPNSGGAGYNQKFKGRVTMTTDTSTSTAYMELRSLRSDDTAVYYCARLGYDDIYDDWYFDVWGQGTTVTVSSASTKGPSVFPLAPCSRSTSESTAALGCLVKDYFPEPVTVSWNSGALTSGVHTFPAVLQSSGLYSLSSVVTVPSSNFGTQTYTCNVDHKPSNTKVDKTVERKCCVECPPCPAPPVAGPSVFLFPPKPKDTLMISRTPEVTCVVVDVSHEDPEVQFNWYVDGVEVHNAKTKPREEQFNSTFRVVSVLTVVHQDWLNGKEYKCKVSNKGLPAPIEKTISKTKGQPREPQVYTLPPSREEMTKNQVSLTCLVKGFYPSDIAVEWESNGQPENNYKTTPPMLDSDGSFFLYSKLTVDKSRWQQGNVFSCSVMHEALHNHYTQKSLSLSPGK

SEQ ID NO: 148 - DNA, 1404 bp, Mus musculus
atggactggacctggaggatcctcttcttggtggcagcagccacaggagcccactccgaggtgcagctggtgcagagcggcgccgaggtaaaaaaaccaggagcaagcgttaaagtttcttgtaaagcaagcggatatacatttacagattacaacatgcattgggtaagacaagcgccaggacaaggattggaatggatgggcgaaattaaccctaatagtggaggagcaggctacaatcaaaaattcaaagggagagttacaatgacaacagacacaagcacttcaacagcatatatggaactgcgatcacttagaagcgacgatacagctgtatactattgcgcacgacttgggtatgatgatatatatgatgactggtatttcgatgtttggggccagggaacaacagttaccgtctctagtgcctccaccaagggcccatcggtcttccccctggcgccctgctccaggagcacctccgagagcacagcggccctgggctgcctggtcaaggactacttccccgaaccggtgacggtgtcgtggaactcaggcgctctgaccagcggcgtgcacaccttcccagctgtcctacagtcctcaggactctactccctcagcagcgtggtgaccgtgccctccagcaacttcggcacccagacctacacctgcaacgtagatcacaagcccagcaacaccaaggtggacaagacagttgagcgcaaatgttgtgtcgagtgcccaccgtgcccagcaccacctgtggcaggaccgtcagtcttcctcttccccccaaaacccaaggacaccctcatgatctcccggacccctgaggtcacgtgcgtggtggtggacgtgagccacgaagaccccgaggtccagttcaactggtacgtggacggcgtggaggtgcataatgccaagacaaagccacgggaggagcagttcaacagcacgttccgtgtggtcagcgtcctcaccgttgtgcaccaggactggctgaacggcaaggagtacaagtgcaaggtctccaacaaaggcctcccagcccccatcgagaaaaccatctccaaaaccaaagggcagccccgagaaccacaggtgtacaccctgcccccatcccgggaggagatgaccaagaaccaggtcagcctgacctgcctggtcaaaggcttctaccccagcgacatcgccgtggagtgggagagcaatgggcagccggagaacaactacaagaccacacctcccatgctggactccgacggctccttcttcctctacagcaagctcaccgtggacaagagcaggtggcagcaggggaacgtcttctcatgctccgtgatgcatgaggctctgcacaaccactacacgcagaagagcctctccctgtctccgggtaaa

SEQ ID NO: 149 - protein, 214 aa, Mus musculus
DIQMTQTTSSLSASLGDRVTISCRASQDISNYLNWFQQKPDGTLKLLIFYTSRLHSGVPSRFSGSGSGTDYSLTISNLEQEDIATYFCQQGDTLPYTFGGGTKLEIRRADAAPTVSIFPPSSEQLTSGGASVVCFLNNFYPKDINVKWKIDGSERQNGVLNSWTDQDSKDSTYSMSSTLTLTKDEYERHNSYTCEATHKTSTSPIVKSFNRNEC

SEQ ID NO: 150 - DNA, 645 bp, Mus musculus
gatatccagatgacacagactacatcctccctgtctgcctctctgggagacagagtcaccatcagttgcagggcaagtcaggacattagcaattatttaaactggtttcagcagaaaccagatggaactcttaaactcctgatcttctacacatcaagattacactcaggagttccatcaaggttcagtggcagtgggtctggaacagattattctctcaccattagcaacctggagcaagaagatattgccacttacttttgccaacagggtgatacgcttccgtacacgttcgggggggggaccaagctggaaataagacgggctgatgctgcaccaactgtatccatcttcccaccatccagtgagcagttaacatctggaggtgcctcagtcgtgtgcttcttgaacaacttctaccccaaagacatcaatgtcaagtggaagattgatggcagtgaacgacaaaatggcgtcctgaacagttggactgatcaggacagcaaagacagcacctacagcatgagcagcaccctcacgttgaccaaggacgagtatgaacgacataacagctatacctgtgaggccactcacaagacatcaacttcacccattgtcaagagcttcaacaggaatgagtgttag

SEQ ID NO: 151 - protein, 234 aa, Mus musculus
MMSSAQFLGLLLLCFQGTRCDIQMTQTTSSLSASLGDRVTISCRASQDISNYLNWFQQKPDGTLKLLIFYTSRLHSGVPSRFSGSGSGTDYSLTISNLEQEDIATYFCQQGDTLPYTFGGGTKLEIRRADAAPTVSIFPPSSEQLTSGGASVVCFLNNFYPKDINVKWKIDGSERQNGVLNSWTDQDSKDSTYSMSSTLTLTKDEYERHNSYTCEATHKTSTSPIVKSFNRNEC

SEQ ID NO: 152 - DNA, 705 bp, Mus musculus
atgatgtcctctgctcagttccttggtctcctgttgctctgttttcaaggtaccagatgtgatatccagatgacacagactacatcctccctgtctgcctctctgggagacagagtcaccatcagttgcagggcaagtcaggacattagcaattatttaaactggtttcagcagaaaccagatggaactcttaaactcctgatcttctacacatcaagattacactcaggagttccatcaaggttcagtggcagtgggtctggaacagattattctctcaccattagcaacctggagcaagaagatattgccacttacttttgccaacagggtgatacgcttccgtacacgttcgggggggggaccaagctggaaataagacgggctgatgctgcaccaactgtatccatcttcccaccatccagtgagcagttaacatctggaggtgcctcagtcgtgtgcttcttgaacaacttctaccccaaagacatcaatgtcaagtggaagattgatggcagtgaacgacaaaatggcgtcctgaacagttggactgatcaggacagcaaagacagcacctacagcatgagcagcaccctcacgttgaccaaggacgagtatgaacgacataacagctatacctgtgaggccactcacaagacatcaacttcacccattgtcaagagcttcaacaggaatgagtgttag

SEQ ID NO: 153 - protein, 447 aa, Mus musculus
EVQLQQSGPELMKPGASVKMSCKASGYTFTDYNMHWVKQNQGKSLEWIGEINPNSGGSGYNQKFKGKATLTVDKSSSTAYMELRSLTSEDSAVYYCARLVYDGSYEDWYFDVWGAGTTVTVSSAKTTPPSVYPLAPGSAAQTNSMVTLGCLVKGYFPEPVTVTWNSGSLSSGVHTFPAVLQSDLYTLSSSVTVPSSTWPSETVTCNVAHPASSTKVDKKIVPRDCGCKPCICTVPEVSSVFIFPPKPKDVLTITLTPKVTCVVVDISKDDPEVQFSWFVDDVEVHTAQTQPREEQFNSTFRSVSELPIMHQDWLNGKEFKCRVNSAAFPAPIEKTISKTKGRPKAPQVYTIPPPKEQMAKDKVSLTCMITDFFPEDITVEWQWNGQPAENYKNTQPIMDTDGSYFIYSKLNVQKSNWEAGNTFTCSVLHEGLHNHHTEKSLSHSPGK

SEQ ID NO: 154 - DNA, 1344 bp, Mus musculus
gaggtccagctgcaacagtctggacctgaactaatgaagcctggggcttcagtgaagatgtcctgcaaggcttctggatacacattcactgactacaacatgcactgggtgaaacagaaccaaggaaagagcctagagtggataggagaaattaatcctaacagtggtggtagtggctacaaccaaaagttcaaaggcaaggccacattgactgtagacaagtcttccagcacagcctacatggagctccgcagcctgacatctgaggactctgcagtctattactgtgcaagattggtctacgatggcagctacgaggactggtacttcgatgtctggggcgcagggaccacggtcaccgtctcctcagccaaaacgacacccccatctgtctatccactggcccctggatctgctgcccaaactaactccatggtgaccctgggatgcctggtcaagggctatttccctgagccagtgacagtgacctggaactctggatccctgtccagcggtgtgcacaccttcccagctgtcctgcagtctgacctctacactctgagcagctcagtgactgtcccctccagcacctggcccagcgagaccgtcacctgcaacgttgcccacccggccagcagcaccaaggtggacaagaaaattgtgcccagggattgtggttgtaagccttgcatatgtacagtcccagaagtatcatctgtcttcatcttccccccaaagcccaaggatgtgctcaccattactctgactcctaaggtcacgtgtgttgtggtagacatcagcaaggatgatcccgaggtccagttcagctggtttgtagatgatgtggaggtgcacacagctcagacgcaaccccgggaggagcagttcaacagcactttccgctcagtcagtgaacttcccatcatgcaccaggactggctcaatggcaaggagttcaaatgcagggtcaacagtgcagctttccctgcccccatcgagaaaaccatctccaaaaccaaaggcagaccgaaggctccacaggtgtacaccattccacctcccaaggagcagatggccaaggataaagtcagtctgacctgcatgataacagacttcttccctgaagacattactgtggagtggcagtggaatgggcagccagcggagaactacaagaacactcagcccatcatggacacagatggctcttacttcatctacagcaagctcaatgtgcagaagagcaactgggaggcaggaaatactttcacctgctctgtgttacatgagggcctgcacaaccaccatactgagaagagcctctcccactctcctggtaaatga

SEQ ID NO: 155 - protein, 466 aa, Mus musculus
MGWSWTFLFLLSGTAGVLSEVQLQQSGPELMKPGASVKMSCKASGYTFTDYNMHWVKQNQGKSLEWIGEINPNSGGSGYNQKFKGKATLTVDKSSSTAYMELRSLTSEDSAVYYCARLVYDGSYEDWYFDVWGAGTTVTVSSAKTTPPSVYPLAPGSAAQTNSMVTLGCLVKGYFPEPVTVTWNSGSLSSGVHTFPAVLQSDLYTLSSSVTVPSSTWPSETVTCNVAHPASSTKVDKKIVPRDCGCKPCICTVPEVSSVFIFPPKPKDVLTITLTPKVTCVVVDISKDDPEVQFSWFVDDVEVHTAQTQPREEQFNSTFRSVSELPIMHQDWLNGKEFKCRVNSAAFPAPIEKTISKTKGRPKAPQVYTIPPPKEQMAKDKVSLTCMITDFFPEDITVEWQWNGQPAENYKNTQPIMDTDGSYFIYSKLNVQKSNWEAGNTFTCSVLHEGLHNHHTEKSLSHSPGK

SEQ ID NO: 156 - DNA, 1401 bp, Mus musculus
atgggatggagctggacctttctcttcctcctgtcaggaactgcaggtgtcctctctgaggtccagctgcaacagtctggacctgaactaatgaagcctggggcttcagtgaagatgtcctgcaaggcttctggatacacattcactgactacaacatgcactgggtgaaacagaaccaaggaaagagcctagagtggataggagaaattaatcctaacagtggtggtagtggctacaaccaaaagttcaaaggcaaggccacattgactgtagacaagtcttccagcacagcctacatggagctccgcagcctgacatctgaggactctgcagtctattactgtgcaagattggtctacgatggcagctacgaggactggtacttcgatgtctggggcgcagggaccacggtcaccgtctcctcagccaaaacgacacccccatctgtctatccactggcccctggatctgctgcccaaactaactccatggtgaccctgggatgcctggtcaagggctatttccctgagccagtgacagtgacctggaactctggatccctgtccagcggtgtgcacaccttcccagctgtcctgcagtctgacctctacactctgagcagctcagtgactgtcccctccagcacctggcccagcgagaccgtcacctgcaacgttgcccacccggccagcagcaccaaggtggacaagaaaattgtgcccagggattgtggttgtaagccttgcatatgtacagtcccagaagtatcatctgtcttcatcttccccccaaagcccaaggatgtgctcaccattactctgactcctaaggtcacgtgtgttgtggtagacatcagcaaggatgatcccgaggtccagttcagctggtttgtagatgatgtggaggtgcacacagctcagacgcaaccccgggaggagcagttcaacagcactttccgctcagtcagtgaacttcccatcatgcaccaggactggctcaatggcaaggagttcaaatgcagggtcaacagtgcagctttccctgcccccatcgagaaaaccatctccaaaaccaaaggcagaccgaaggctccacaggtgtacaccattccacctcccaaggagcagatggccaaggataaagtcagtctgacctgcatgataacagacttcttccctgaagacattactgtggagtggcagtggaatgggcagccagcggagaactacaagaacactcagcccatcatggacacagatggctcttacttcatctacagcaagctcaatgtgcagaagagcaactgggaggcaggaaatactttcacctgctctgtgttacatgagggcctgcacaaccaccatactgagaagagcctctcccactctcctggtaaatga

SEQ ID NO: 157 - protein, 214 aa, Mus musculus
DIQMTQTTSSLSASLGDRVTICCRASQVITNYLYWYQQKPDGTFKLLIYYTSRLHSGVPSRFSGSGSGTDYSLTISNLEQEDIATYFCQQGDTLPYTFGGGTKLEIKRADAAPTVSIFPPSSEQLTSGGASVVCFLNNFYPKDINVKWKIDGSERQNGVLNSWTDQDSKDSTYSMSSTLTLTKDEYERHNSYTCEATHKTSTSPIVKSFNRNEC

SEQ ID NO: 158 - DNA, 642 bp, Mus musculus
gatatccagatgacacagactacatcctccctgtctgcctctctgggagacagagtcaccatctgttgcagggcaagtcaggtcattaccaattatttatactggtatcagcagaaaccagatggaacttttaaactcctgatctactacacatcaagattacactcaggagtcccatcaaggttcagtggcagtgggtctggaacagattattctctcaccattagcaacctggaacaggaagatattgccacttacttttgccaacagggtgatacgcttccgtacacgttcggaggggggaccaagctggaaataaaacgggctgatgctgcaccaactgtatccatcttcccaccatccagtgagcagttaacatctggaggtgcctcagtcgtgtgcttcttgaacaacttctaccccaaagacatcaatgtcaagtggaagattgatggcagtgaacgacaaaatggcgtcctgaacagttggactgatcaggacagcaaagacagcacctacagcatgagcagcaccctcacgttgaccaaggacgagtatgaacgacataacagctatacctgtgaggccactcacaagacatcaacttcacccattgtcaagagcttcaacaggaatgagtgt

SEQ ID NO: 159 - protein, 234 aa, Mus musculus
MMSSAQFLGLLLLCFQGTRCDIQMTQTTSSLSASLGDRVTICCRASQVITNYLYWYQQKPDGTFKLLIYYTSRLHSGVPSRFSGSGSGTDYSLTISNLEQEDIATYFCQQGDTLPYTFGGGTKLEIKRADAAPTVSIFPPSSEQLTSGGASVVCFLNNFYPKDINVKWKIDGSERQNGVLNSWTDQDSKDSTYSMSSTLTLTKDEYERHNSYTCEATHKTSTSPIVKSFNRNEC

SEQ ID NO: 160 - DNA, 702 bp, Mus musculus
atgatgtcctctgctcagttccttggtctcctgttgctctgttttcaaggtaccagatgtgatatccagatgacacagactacatcctccctgtctgcctctctgggagacagagtcaccatctgttgcagggcaagtcaggtcattaccaattatttatactggtatcagcagaaaccagatggaacttttaaactcctgatctactacacatcaagattacactcaggagtcccatcaaggttcagtggcagtgggtctggaacagattattctctcaccattagcaacctggaacaggaagatattgccacttacttttgccaacagggtgatacgcttccgtacacgttcggaggggggaccaagctggaaataaaacgggctgatgctgcaccaactgtatccatcttcccaccatccagtgagcagttaacatctggaggtgcctcagtcgtgtgcttcttgaacaacttctaccccaaagacatcaatgtcaagtggaagattgatggcagtgaacgacaaaatggcgtcctgaacagttggactgatcaggacagcaaagacagcacctacagcatgagcagcaccctcacgttgaccaaggacgagtatgaacgacataacagctatacctgtgaggccactcacaagacatcaacttcacccattgtcaagagcttcaacaggaatgagtgt

SEQ ID NO: 161 - protein, 447 aa, Mus musculus
EVQLQQSGPELMKPGASVKMSCKASGYTFTDYNMHWMKQNQGKSLEWIGEINPNSGGAGYNQQFKGKATLTVDKSSRTAYMELRSLTSEDSAVYYCARLGYVGNYEDWYFDVWGAGTTVTVSSAKTTPPSVYPLAPGSAAQTNSMVTLGCLVKGYFPEPVTVTWNSGSLSSGVHTFPAVLQSDLYTLSSSVTVPSSTWPSETVTCNVAHPASSTKVDKKIVPRDCGCKPCICTVPEVSSVFIFPPKPKDVLTITLTPKVTCVVVDISKDDPEVQFSWFVDDVEVHTAQTQPREEQFNSTFRSVSELPIMHQDWLNGKEFKCRVNSAAFPAPIEKTISKTKGRPKAPQVYTIPPPKEQMAKDKVSLTCMITDFFPEDITVEWQWNGQPAENYKNTQPIMDTDGSYFIYSKLNVQKSNWEAGNTFTCSVLHEGLHNHHTEKSLSHSPGK

SEQ ID NO: 162 - DNA, 1341 bp, Mus musculus
gaggtccagctgcaacagtctggacctgaactaatgaagcctggggcttcagtgaagatgtcctgcaaggcttctggatacacattcactgactacaacatgcactggatgaagcagaaccaaggaaagagcctagaatggataggagaaattaatcctaacagtggtggtgctggctacaaccagcagttcaaaggcaaggccacattgactgtagacaagtcctccaggacagcctacatggagctccgcagcctgacatctgaggactctgcagtctattactgtgcaagattgggctacgttggtaattacgaggactggtacttcgatgtctggggcgcagggaccacggtcaccgtctcctcagccaaaacgacacccccatctgtctatccactggcccctggatctgctgcccaaactaactccatggtgaccctgggatgcctggtcaagggctatttccctgagccagtgacagtgacctggaactctggatccctgtccagcggtgtgcacaccttcccagctgtcctgcagtctgacctctacactctgagcagctcagtgactgtcccctccagcacctggcccagcgagaccgtcacctgcaacgttgcccacccggccagcagcaccaaggtggacaagaaaattgtgcccagggattgtggttgtaagccttgcatatgtacagtcccagaagtatcatctgtcttcatcttccccccaaagcccaaggatgtgctcaccattactctgactcctaaggtcacgtgtgttgtggtagacatcagcaaggatgatcccgaggtccagttcagctggtttgtagatgatgtggaggtgcacacagctcagacgcaaccccgggaggagcagttcaacagcactttccgctcagtcagtgaacttcccatcatgcaccaggactggctcaatggcaaggagttcaaatgcagggtcaacagtgcagctttccctgcccccatcgagaaaaccatctccaaaaccaaaggcagaccgaaggctccacaggtgtacaccattccacctcccaaggagcagatggccaaggataaagtcagtctgacctgcatgataacagacttcttccctgaagacattactgtggagtggcagtggaatgggcagccagcggagaactacaagaacactcagcccatcatggacacagatggctcttacttcatctacagcaagctcaatgtgcagaagagcaactgggaggcaggaaatactttcacctgctctgtgttacatgagggcctgcacaaccaccatactgagaagagcctctcccactctcctggtaaa

SEQ ID NO: 163 - protein, 466 aa, Mus musculus
MGWSWTFLFLLSGTAGVLSEVQLQQSGPELMKPGASVKMSCKASGYTFTDYNMHWMKQNQGKSLEWIGEINPNSGGAGYNQQFKGKATLTVDKSSRTAYMELRSLTSEDSAVYYCARLGYVGNYEDWYFDVWGAGTTVTVSSAKTTPPSVYPLAPGSAAQTNSMVTLGCLVKGYFPEPVTVTWNSGSLSSGVHTFPAVLQSDLYTLSSSVTVPSSTWPSETVTCNVAHPASSTKVDKKIVPRDCGCKPCICTVPEVSSVFIFPPKPKDVLTITLTPKVTCVVVDISKDDPEVQFSWFVDDVEVHTAQTQPREEQFNSTFRSVSELPIMHQDWLNGKEFKCRVNSAAFPAPIEKTISKTKGRPKAPQVYTIPPPKEQMAKDKVSLTCMITDFFPEDITVEWQWNGQPAENYKNTQPIMDTDGSYFIYSKLNVQKSNWEAGNTFTCSVLHEGLHNHHTEKSLSHSPGK

SEQ ID NO: 164 - DNA, 1398 bp, Mus musculus
atgggatggagctggacctttctcttcctcctgtcaggaactgcaggtgtcctctctgaggtccagctgcaacagtctggacctgaactaatgaagcctggggcttcagtgaagatgtcctgcaaggcttctggatacacattcactgactacaacatgcactggatgaagcagaaccaaggaaagagcctagaatggataggagaaattaatcctaacagtggtggtgctggctacaaccagcagttcaaaggcaaggccacattgactgtagacaagtcctccaggacagcctacatggagctccgcagcctgacatctgaggactctgcagtctattactgtgcaagattgggctacgttggtaattacgaggactggtacttcgatgtctggggcgcagggaccacggtcaccgtctcctcagccaaaacgacacccccatctgtctatccactggcccctggatctgctgcccaaactaactccatggtgaccctgggatgcctggtcaagggctatttccctgagccagtgacagtgacctggaactctggatccctgtccagcggtgtgcacaccttcccagctgtcctgcagtctgacctctacactctgagcagctcagtgactgtcccctccagcacctggcccagcgagaccgtcacctgcaacgttgcccacccggccagcagcaccaaggtggacaagaaaattgtgcccagggattgtggttgtaagccttgcatatgtacagtcccagaagtatcatctgtcttcatcttccccccaaagcccaaggatgtgctcaccattactctgactcctaaggtcacgtgtgttgtggtagacatcagcaaggatgatcccgaggtccagttcagctggtttgtagatgatgtggaggtgcacacagctcagacgcaaccccgggaggagcagttcaacagcactttccgctcagtcagtgaacttcccatcatgcaccaggactggctcaatggcaaggagttcaaatgcagggtcaacagtgcagctttccctgcccccatcgagaaaaccatctccaaaaccaaaggcagaccgaaggctccacaggtgtacaccattccacctcccaaggagcagatggccaaggataaagtcagtctgacctgcatgataacagacttcttccctgaagacattactgtggagtggcagtggaatgggcagccagcggagaactacaagaacactcagcccatcatggacacagatggctcttacttcatctacagcaagctcaatgtgcagaagagcaactgggaggcaggaaatactttcacctgctctgtgttacatgagggcctgcacaaccaccatactgagaagagcctctcccactctcctggtaaa

SEQ ID NO: 165 - protein, 214 aa, Mus musculus
DIQMTQTTSSLSASLGDRVSISCRASQDISNYLNWYQQKPDGTFKLLIFYTSRLLSGVPSRFSGSGSGTDYSLTIYNLEQEDFATYFCQQGDTLPYTFGGGTKLEIKRADAAPTVSIFPPSSEQLTSGGASVVCFLNNFYPKDINVKWKIDGSERQNGVLNSWTDQDSKDSTYSMSSTLTLTKDEYERHNSYTCEATHKTSTSPIVKSFNRNEC

SEQ ID NO: 166 - DNA, 645 bp, Mus musculus
gatatccagatgacacagactacatcctccctgtctgcctctctgggagacagggtctccatcagttgcagggcaagtcaagacattagcaattatttaaactggtatcagcagaaaccagatggaacttttaaactccttatcttctacacatcaagattactctcaggagtcccatcaaggttcagtggcagtgggtctggaacagattattctctcaccatttacaacctggagcaagaagattttgccacttacttttgccaacagggagatacgcttccgtacactttcggaggggggaccaaactggaaataaaacgggctgatgctgcaccaactgtatccatcttcccaccatccagtgagcagttaacatctggaggtgcctcagtcgtgtgcttcttgaacaacttctaccccaaagacatcaatgtcaagtggaagattgatggcagtgaacgacaaaatggcgtcctgaacagttggactgatcaggacagcaaagacagcacctacagcatgagcagcaccctcacgttgaccaaggacgagtatgaacgacataacagctatacctgtgaggccactcacaagacatcaacttcacccattgtcaagagcttcaacaggaatgagtgttag

SEQ ID NO: 167 - protein, 234 aa, Mus musculus
MMSSAQFLGLLLLCFQGTRCDIQMTQTTSSLSASLGDRVSISCRASQDISNYLNWYQQKPDGTFKLLIFYTSRLLSGVPSRFSGSGSGTDYSLTIYNLEQEDFATYFCQQGDTLPYTFGGGTKLEIKRADAAPTVSIFPPSSEQLTSGGASVVCFLNNFYPKDINVKWKIDGSERQNGVLNSWTDQDSKDSTYSMSSTLTLTKDEYERHNSYTCEATHKTSTSPIVKSFNRNEC

SEQ ID NO: 168 - DNA, 705 bp, Mus musculus
atgatgtcctctgctcagttccttggtctcctgttgctctgttttcaaggtaccagatgtgatatccagatgacacagactacatcctccctgtctgcctctctgggagacagggtctccatcagttgcagggcaagtcaagacattagcaattatttaaactggtatcagcagaaaccagatggaacttttaaactccttatcttctacacatcaagattactctcaggagtcccatcaaggttcagtggcagtgggtctggaacagattattctctcaccatttacaacctggagcaagaagattttgccacttacttttgccaacagggagatacgcttccgtacactttcggaggggggaccaaactggaaataaaacgggctgatgctgcaccaactgtatccatcttcccaccatccagtgagcagttaacatctggaggtgcctcagtcgtgtgcttcttgaacaacttctaccccaaagacatcaatgtcaagtggaagattgatggcagtgaacgacaaaatggcgtcctgaacagttggactgatcaggacagcaaagacagcacctacagcatgagcagcaccctcacgttgaccaaggacgagtatgaacgacataacagctatacctgtgaggccactcacaagacatcaacttcacccattgtcaagagcttcaacaggaatgagtgttag

SEQ ID NO: 169 - protein, 447 aa, Mus musculus
EVQLQQSGPELMKPGASVKMSCKASGYTFTDYNMHWVKQNQGKTLDWIGEINPNSGGAGYNQKFKGKATLTVDKSSTTAYMELRSLTSEDSAVYYCARLGYDDIYDDWYFDVWGAGTTVTVSSAKTTPPSVYPLAPGSAAQTNSMVTLGCLVKGYFPEPVTVTWNSGSLSSGVHTFPAVLQSDLYTLSSSVTVPSSTWPSETVTCNVAHPASSTKVDKKIVPRDCGCKPCICTVPEVSSVFIFPPKPKDVLTITLTPKVTCVVVDISKDDPEVQFSWFVDDVEVHTAQTQPREEQFNSTFRSVSELPIMHQDWLNGKEFKCRVNSAAFPAPIEKTISKTKGRPKAPQVYTIPPPKEQMAKDKVSLTCMITDFFPEDITVEWQWNGQPAENYKNTQPIMDTDGSYFIYSKLNVQKSNWEAGNTFTCSVLHEGLHNHHTEKSLSHSPGK

SEQ ID NO: 170 - DNA, 1344 bp, Mus musculus
gaggtccaactgcaacagtctggacctgaactaatgaagcctggggcttcagtgaagatgtcctgcaaggcttctggatatacattcactgactacaacatgcactgggtgaagcagaaccaaggaaagaccctagactggataggagaaattaatcctaacagtggtggtgctggctacaaccagaagttcaagggcaaggccacattgactgtagacaagtcctccaccacagcctacatggagctccgcagcctgacatctgaggactctgcagtctattactgtgcaagattgggctacgatgatatctacgacgactggtacttcgatgtctggggcgcagggaccacggtcaccgtctcctcagccaaaacgacacccccatctgtctatccactggcccctggatctgctgcccaaactaactccatggtgaccctgggatgcctggtcaagggctatttccctgagccagtgacagtgacctggaactctggatccctgtccagcggtgtgcacaccttcccagctgtcctgcagtctgacctctacactctgagcagctcagtgactgtcccctccagcacctggcccagcgagaccgtcacctgcaacgttgcccacccggccagcagcaccaaggtggacaagaaaattgtgcccagggattgtggttgtaagccttgcatatgtacagtcccagaagtatcatctgtcttcatcttccccccaaagcccaaggatgtgctcaccattactctgactcctaaggtcacgtgtgttgtggtagacatcagcaaggatgatcccgaggtccagttcagctggtttgtagatgatgtggaggtgcacacagctcagacgcaaccccgggaggagcagttcaacagcactttccgctcagtcagtgaacttcccatcatgcaccaggactggctcaatggcaaggagttcaaatgcagggtcaacagtgcagctttccctgcccccatcgagaaaaccatctccaaaaccaaaggcagaccgaaggctccacaggtgtacaccattccacctcccaaggagcagatggccaaggataaagtcagtctgacctgcatgataacagacttcttccctgaagacattactgtggagtggcagtggaatgggcagccagcggagaactacaagaacactcagcccatcatggacacagatggctcttacttcatctacagcaagctcaatgtgcagaagagcaactgggaggcaggaaatactttcacctgctctgtgttacatgagggcctgcacaaccaccatactgagaagagcctctcccactctcctggtaaatga

SEQ ID NO: 171 - protein, 466 aa, Mus musculus
MGWSWTFLFLLSGTAGVLSEVQLQQSGPELMKPGASVKMSCKASGYTFTDYNMHWVKQNQGKTLDWIGEINPNSGGAGYNQKFKGKATLTVDKSSTTAYMELRSLTSEDSAVYYCARLGYDDIYDDWYFDVWGAGTTVTVSSAKTTPPSVYPLAPGSAAQTNSMVTLGCLVKGYFPEPVTVTWNSGSLSSGVHTFPAVLQSDLYTLSSSVTVPSSTWPSETVTCNVAHPASSTKVDKKIVPRDCGCKPCICTVPEVSSVFIFPPKPKDVLTITLTPKVTCVVVDISKDDPEVQFSWFVDDVEVHTAQTQPREEQFNSTFRSVSELPIMHQDWLNGKEFKCRVNSAAFPAPIEKTISKTKGRPKAPQVYTIPPPKEQMAKDKVSLTCMITDFFPEDITVEWQWNGQPAENYKNTQPIMDTDGSYFIYSKLNVQKSNWEAGNTFTCSVLHEGLHNHHTEKSLSHSPGK

SEQ ID NO: 172 - DNA, 1401 bp, Mus musculus
atgggatggagctggacctttctcttcctcctgtcaggaactgcaggtgtcctctctgaggtccaactgcaacagtctggacctgaactaatgaagcctggggcttcagtgaagatgtcctgcaaggcttctggatatacattcactgactacaacatgcactgggtgaagcagaaccaaggaaagaccctagactggataggagaaattaatcctaacagtggtggtgctggctacaaccagaagttcaagggcaaggccacattgactgtagacaagtcctccaccacagcctacatggagctccgcagcctgacatctgaggactctgcagtctattactgtgcaagattgggctacgatgatatctacgacgactggtacttcgatgtctggggcgcagggaccacggtcaccgtctcctcagccaaaacgacacccccatctgtctatccactggcccctggatctgctgcccaaactaactccatggtgaccctgggatgcctggtcaagggctatttccctgagccagtgacagtgacctggaactctggatccctgtccagcggtgtgcacaccttcccagctgtcctgcagtctgacctctacactctgagcagctcagtgactgtcccctccagcacctggcccagcgagaccgtcacctgcaacgttgcccacccggccagcagcaccaaggtggacaagaaaattgtgcccagggattgtggttgtaagccttgcatatgtacagtcccagaagtatcatctgtcttcatcttccccccaaagcccaaggatgtgctcaccattactctgactcctaaggtcacgtgtgttgtggtagacatcagcaaggatgatcccgaggtccagttcagctggtttgtagatgatgtggaggtgcacacagctcagacgcaaccccgggaggagcagttcaacagcactttccgctcagtcagtgaacttcccatcatgcaccaggactggctcaatggcaaggagttcaaatgcagggtcaacagtgcagctttccctgcccccatcgagaaaaccatctccaaaaccaaaggcagaccgaaggctccacaggtgtacaccattccacctcccaaggagcagatggccaaggataaagtcagtctgacctgcatgataacagacttcttccctgaagacattactgtggagtggcagtggaatgggcagccagcggagaactacaagaacactcagcccatcatggacacagatggctcttacttcatctacagcaagctcaatgtgcagaagagcaactgggaggcaggaaatactttcacctgctctgtgttacatgagggcctgcacaaccaccatactgagaagagcctctcccactctcctggtaaatga

SEQ ID NO: 173 - protein, 214 aa, Mus musculus
DIQMTQITSSLSASLGDRVSISCRASQDISNYLNWYQQKPDGTFKLLIFYTSRLFSGVPSRFSGSGSGTDYSLTIYNLEQEDFATYFCQQGDTLPYTFGGGTKVEIKRADAAPTVSIFPPSSEQLTSGGASVVCFLNNFYPKDINVKWKIDGSERQNGVLNSWTDQDSKDSTYSMSSTLTLTKDEYERHNSYTCEATHKTSTSPIVKSFNRNEC

SEQ ID NO: 174 - DNA, 642 bp, Mus musculus
gatatccagatgacacagattacatcctccctgtctgcctctctgggagacagggtctccatcagttgcagggcaagtcaagacattagcaattatttaaattggtatcagcagaaaccagatggaacttttaaactccttatcttctacacatcaagattattttcaggagtcccatcaaggttcagtggcagtgggtctggaacagattattctctcaccatttacaacctggagcaagaagattttgccacttacttttgccaacagggagatacgcttccgtacactttcggaggggggaccaaggtggaaataaaacgggctgatgctgcaccaactgtatccatcttcccaccatccagtgagcagttaacatctggaggtgcctcagtcgtgtgcttcttgaacaacttctaccccaaagacatcaatgtcaagtggaagattgatggcagtgaacgacaaaatggcgtcctgaacagttggactgatcaggacagcaaagacagcacctacagcatgagcagcaccctcacgttgaccaaggacgagtatgaacgacataacagctatacctgtgaggccactcacaagacatcaacttcacccattgtcaagagcttcaacaggaatgagtgt

SEQ ID NO: 175 - protein, 234 aa, Mus musculus
MMSSAQFLGLLLLCFQGTRCDIQMTQITSSLSASLGDRVSISCRASQDISNYLNWYQQKPDGTFKLLIFYTSRLFSGVPSRFSGSGSGTDYSLTIYNLEQEDFATYFCQQGDTLPYTFGGGTKVEIKRADAAPTVSIFPPSSEQLTSGGASVVCFLNNFYPKDINVKWKIDGSERQNGVLNSWTDQDSKDSTYSMSSTLTLTKDEYERHNSYTCEATHKTSTSPIVKSFNRNEC

SEQ ID NO: 176 - DNA, 702 bp, Mus musculus
atgatgtcctctgctcagttccttggtctcctgttgctctgttttcaaggtaccagatgtgatatccagatgacacagattacatcctccctgtctgcctctctgggagacagggtctccatcagttgcagggcaagtcaagacattagcaattatttaaattggtatcagcagaaaccagatggaacttttaaactccttatcttctacacatcaagattattttcaggagtcccatcaaggttcagtggcagtgggtctggaacagattattctctcaccatttacaacctggagcaagaagattttgccacttacttttgccaacagggagatacgcttccgtacactttcggaggggggaccaaggtggaaataaaacgggctgatgctgcaccaactgtatccatcttcccaccatccagtgagcagttaacatctggaggtgcctcagtcgtgtgcttcttgaacaacttctaccccaaagacatcaatgtcaagtggaagattgatggcagtgaacgacaaaatggcgtcctgaacagttggactgatcaggacagcaaagacagcacctacagcatgagcagcaccctcacgttgaccaaggacgagtatgaacgacataacagctatacctgtgaggccactcacaagacatcaacttcacccattgtcaagagcttcaacaggaatgagtgt

SEQ ID NO: 177 - protein, 450 aa, Mus musculus
EVQLQQSGPELMKPGTSVKMSCKASGYTFTDYNMHWVKQTQGKTLEWIGEINPNSGGAGYNQKFKGKATLTVDKSSTTAYMELRSLTSEDSAVYYCAKLGYDDIYDDWYFDVWGAGTTVTVSSAKTTAPSVYPLAPVCGDTTGSSVTLGCLVKGYFPEPVTLTWNSGSLSSDVHTFPALLQSGLYTLSSSVTVTTWPSQTITCNVAHPASSTKVDKKIEPRGSPTHKPCPPCPAPNLLGGPSVFIFPPKIKDVLMISLSPMVTCVVVDVSEDDPDVHVSWFVNNVEVHTAQTQTHREDYNSTIRVVSALPIQHQDWMSGKEFKCKVNNKALPAPIERTISKPKGPVRAPQVYVLPPPEEEMTKKQVTLTCMITDFMPEDIYVEWTNNGQTELNYKNTEPVLDSDGSYFMYSKLRVEKKNWVERNSYSCSVVHEGLHNHHTTKSFSRTPGK

SEQ ID NO: 178 - DNA, 1350 bp, Mus musculus
gaggtccaactgcaacagtctggacctgaactaatgaagcctgggacttcagtgaagatgtcctgcaaggcttctggatatacattcactgactacaacatgcactgggtgaagcagacccaaggaaagaccctagagtggataggagaaattaatcctaacagtggtggtgctggctacaaccagaagttcaagggcaaggccacattgactgtagacaagtcctccaccacagcctacatggagctccgcagcctgacatctgaggactctgcagtctattactgtgcaaaattgggctacgatgatatctacgacgactggtatttcgatgtctggggcgcagggaccacggtcaccgtctcctcagccaaaacaacagccccatcggtctatccactggcccctgtgtgtggagatacaactggctcctcggtgactctaggatgcctggtcaagggttatttccctgagccagtgaccttgacctggaactctggatccctgtccagtgatgtgcacaccttcccagctctcctgcagtctggcctctacaccctcagcagctcagtgactgtaaccacctggcccagccagaccatcacctgcaatgtggcccacccggcaagcagcaccaaagtggacaagaaaattgagcccagagggtccccaacacataaaccctgtcctccatgcccagctcctaacctcttgggtggaccatccgtcttcatcttccctccaaagatcaaggatgtactcatgatctccctgagccccatggtcacgtgtgtggtggtggatgtgagcgaggatgacccagatgtccatgtcagctggttcgtgaacaacgtggaagtacacacagctcagacacaaacccatagagaggattacaacagtactatccgggtggtcagtgccctccccatccagcaccaggactggatgagtggcaaggagttcaaatgcaaggtcaacaacaaagccctcccagcgcccatcgagagaaccatctcaaaacccaaagggccagtaagagctccacaggtatatgtcttgcctccaccagaagaagagatgactaagaaacaggtcactctgacctgcatgatcacagacttcatgcctgaagacatttacgtggagtggaccaacaacgggcaaacagagctaaactacaagaacactgaaccagtcctggactctgatggttcttacttcatgtacagcaagctgagagtggaaaagaagaactgggtggaaagaaatagctactcctgttcagtggtccacgagggtctgcacaatcaccacacgactaagagcttctcccggactccgggtaaa

SEQ ID NO: 179 - protein, 469 aa, Mus musculus
MGWSWTFLFLLSGTAGVLSEVQLQQSGPELMKPGTSVKMSCKASGYTFTDYNMHWVKQTQGKTLEWIGEINPNSGGAGYNQKFKGKATLTVDKSSTTAYMELRSLTSEDSAVYYCAKLGYDDIYDDWYFDVWGAGTTVTVSSAKTTAPSVYPLAPVCGDTTGSSVTLGCLVKGYFPEPVTLTWNSGSLSSDVHTFPALLQSGLYTLSSSVTVTTWPSQTITCNVAHPASSTKVDKKIEPRGSPTHKPCPPCPAPNLLGGPSVFIFPPKIKDVLMISLSPMVTCVVVDVSEDDPDVHVSWFVNNVEVHTAQTQTHREDYNSTIRVVSALPIQHQDWMSGKEFKCKVNNKALPAPIERTISKPKGPVRAPQVYVLPPPEEEMTKKQVTLTCMITDFMPEDIYVEWTNNGQTELNYKNTEPVLDSDGSYFMYSKLRVEKKNWVERNSYSCSVVHEGLHNHHTTKSFSRTPGK

SEQ ID NO: 180 - DNA, 1407 bp, Mus musculus
atgggatggagctggacctttctcttcctcctgtcaggaactgcaggtgtcctctctgaggtccaactgcaacagtctggacctgaactaatgaagcctgggacttcagtgaagatgtcctgcaaggcttctggatatacattcactgactacaacatgcactgggtgaagcagacccaaggaaagaccctagagtggataggagaaattaatcctaacagtggtggtgctggctacaaccagaagttcaagggcaaggccacattgactgtagacaagtcctccaccacagcctacatggagctccgcagcctgacatctgaggactctgcagtctattactgtgcaaaattgggctacgatgatatctacgacgactggtatttcgatgtctggggcgcagggaccacggtcaccgtctcctcagccaaaacaacagccccatcggtctatccactggcccctgtgtgtggagatacaactggctcctcggtgactctaggatgcctggtcaagggttatttccctgagccagtgaccttgacctggaactctggatccctgtccagtgatgtgcacaccttcccagctctcctgcagtctggcctctacaccctcagcagctcagtgactgtaaccacctggcccagccagaccatcacctgcaatgtggcccacccggcaagcagcaccaaagtggacaagaaaattgagcccagagggtccccaacacataaaccctgtcctccatgcccagctcctaacctcttgggtggaccatccgtcttcatcttccctccaaagatcaaggatgtactcatgatctccctgagccccatggtcacgtgtgtggtggtggatgtgagcgaggatgacccagatgtccatgtcagctggttcgtgaacaacgtggaagtacacacagctcagacacaaacccatagagaggattacaacagtactatccgggtggtcagtgccctccccatccagcaccaggactggatgagtggcaaggagttcaaatgcaaggtcaacaacaaagccctcccagcgcccatcgagagaaccatctcaaaacccaaagggccagtaagagctccacaggtatatgtcttgcctccaccagaagaagagatgactaagaaacaggtcactctgacctgcatgatcacagacttcatgcctgaagacatttacgtggagtggaccaacaacgggcaaacagagctaaactacaagaacactgaaccagtcctggactctgatggttcttacttcatgtacagcaagctgagagtggaaaagaagaactgggtggaaagaaatagctactcctgttcagtggtccacgagggtctgcacaatcaccacacgactaagagcttctcccggactccgggtaaa

SEQ ID NO: 181 - protein, 214 aa, Mus musculus
DIQMTQTTSSLSASLGDRVSISCRASQDISNYLNWYQQKPDGTFKLLIFYTSRLLSGVPSRFSGSGSGTDYSLTIYNLEQEDFATYFCQQGDTLPYTFGGGTKLEIKRADAAPTVSIFPLSSEQLTSGGASVVCFLNNFYPKDINVKWKIDGSERQNGVLNSWTDQDSKDSTYSMSSTLTLTKDEYERHNSYTCEATHKTSTSPIVKSFNRNEC

SEQ ID NO: 182 - DNA, 645 bp, Mus musculus
gatatccagatgacacagactacatcctccctgtctgcctctctgggagacagggtctccatcagttgcagggcaagtcaagacattagcaattatttaaactggtatcagcagaaaccagatggaacttttaaactccttatcttctacacatcaagattactctcaggagtcccatcaaggttcagtggcagtgggtctggaacagattattctctcaccatttacaacctggagcaagaagattttgccacttacttttgccaacagggagatacgcttccgtacactttcggaggggggaccaaactggaaataaaacgggctgatgctgcaccaactgtatccatcttcccactatccagtgagcagttaacatctggaggtgcctcagtcgtgtgcttcttgaacaacttctaccccaaagacatcaatgtcaagtggaagattgatggcagtgaacgacaaaatggcgtcctgaacagttggactgatcaggacagcaaagacagcacctacagcatgagcagcaccctcacgttgaccaaggacgagtatgaacgacataacagctatacctgtgaggccactcacaagacatcaacttcacccattgtcaagagcttcaacaggaatgagtgttag

SEQ ID NO: 183 - protein, 234 aa, Mus musculus
MMSSAQFLGLLLLCFQGTRCDIQMTQTTSSLSASLGDRVSISCRASQDISNYLNWYQQKPDGTFKLLIFYTSRLLSGVPSRFSGSGSGTDYSLTIYNLEQEDFATYFCQQGDTLPYTFGGGTKLEIKRADAAPTVSIFPLSSEQLTSGGASVVCFLNNFYPKDINVKWKIDGSERQNGVLNSWTDQDSKDSTYSMSSTLTLTKDEYERHNSYTCEATHKTSTSPIVKSFNRNEC

SEQ ID NO: 184 - DNA, 705 bp, Mus musculus
atgatgtcctctgctcagttccttggtctcctgttgctctgttttcaaggtaccagatgtgatatccagatgacacagactacatcctccctgtctgcctctctgggagacagggtctccatcagttgcagggcaagtcaagacattagcaattatttaaactggtatcagcagaaaccagatggaacttttaaactccttatcttctacacatcaagattactctcaggagtcccatcaaggttcagtggcagtgggtctggaacagattattctctcaccatttacaacctggagcaagaagattttgccacttacttttgccaacagggagatacgcttccgtacactttcggaggggggaccaaactggaaataaaacgggctgatgctgcaccaactgtatccatcttcccactatccagtgagcagttaacatctggaggtgcctcagtcgtgtgcttcttgaacaacttctaccccaaagacatcaatgtcaagtggaagattgatggcagtgaacgacaaaatggcgtcctgaacagttggactgatcaggacagcaaagacagcacctacagcatgagcagcaccctcacgttgaccaaggacgagtatgaacgacataacagctatacctgtgaggccactcacaagacatcaacttcacccattgtcaagagcttcaacaggaatgagtgttag

SEQ ID NO: 185 - protein, 447 aa, Mus musculus; identical to SEQ ID NO: 137

SEQ ID NO: 186 - DNA, 1344 bp, Mus musculus
gaggtccaactgcaacagtctggacctgaactaatgaagcctggggcttcagtgaagatgtcctgcaaggcttctggatatacattcactgactacaacatgcactgggtgaagcagaaccaaggaaagaccctagaatggataggagaaattaatcctaacagtggtggtgctggctacaaccagaagttcaagggcaaggccacattgactgtagacaagtcctccaccacagcctacatggagctccgcagcctgacatctgaggactctgcagtctattactgtgcaagattgggctacgatgatatctacgacgactggtacttcgatgtctggggcgcagggaccacggtcaccgtctcctcagccaaaacgacacccccatctgtctatccactggcccctggatctgctgcccaaactaactccatggtgaccctgggatgcctggtcaagggctatttccctgagccagtgacagtgacctggaactctggatccctgtccagcggtgtgcacaccttcccagctgtcctgcagtctgacctctacactctgagcagctcagtgactgtcccctccagcacctggcccagcgagaccgtcacctgcaacgttgcccacccggccagcagcaccaaggtggacaagaaaattgtgcccagggattgtggttgtaagccttgcatatgtacagtcccagaagtatcatctgtcttcatcttccccccaaagcccaaggatgtgctcaccattactctgactcctaaggtcacgtgtgttgtggtagacatcagcaaggatgatcccgaggtccagttcagctggtttgtagatgatgtggaggtgcacacagctcagacgcaaccccgggaggagcagttcaacagcactttccgctcagtcagtgaacttcccatcatgcaccaggactggctcaatggcaaggagttcaaatgcagggtcaacagtgcagctttccctgcccccatcgagaaaaccatctccaaaaccaaaggcagaccgaaggctccacaggtgtacaccattccacctcccaaggagcagatggccaaggataaagtcagtctgacctgcatgataacagacttcttccctgaagacattactgtggagtggcagtggaatgggcagccagcggagaactacaagaacactcagcccatcatggacacagatggctcttacttcatctacagcaagctcaatgtgcagaagagcaactgggaggcaggaaatactttcacctgctctgtgttacatgagggcctgcacaaccaccatactgagaagagcctctcccactctcctggtaaatga

SEQ ID NO: 187 - protein, 466 aa, Mus musculus; identical to SEQ ID NO: 139

SEQ ID NO: 188 - DNA, 1401 bp, Mus musculus
atgggatggagctggacctttctcttcctcctgtcaggaactgcaggtgtcctctctgaggtccaactgcaacagtctggacctgaactaatgaagcctggggcttcagtgaagatgtcctgcaaggcttctggatatacattcactgactacaacatgcactgggtgaagcagaaccaaggaaagaccctagaatggataggagaaattaatcctaacagtggtggtgctggctacaaccagaagttcaagggcaaggccacattgactgtagacaagtcctccaccacagcctacatggagctccgcagcctgacatctgaggactctgcagtctattactgtgcaagattgggctacgatgatatctacgacgactggtacttcgatgtctggggcgcagggaccacggtcaccgtctcctcagccaaaacgacacccccatctgtctatccactggcccctggatctgctgcccaaactaactccatggtgaccctgggatgcctggtcaagggctatttccctgagccagtgacagtgacctggaactctggatccctgtccagcggtgtgcacaccttcccagctgtcctgcagtctgacctctacactctgagcagctcagtgactgtcccctccagcacctggcccagcgagaccgtcacctgcaacgttgcccacccggccagcagcaccaaggtggacaagaaaattgtgcccagggattgtggttgtaagccttgcatatgtacagtcccagaagtatcatctgtcttcatcttccccccaaagcccaaggatgtgctcaccattactctgactcctaaggtcacgtgtgttgtggtagacatcagcaaggatgatcccgaggtccagttcagctggtttgtagatgatgtggaggtgcacacagctcagacgcaaccccgggaggagcagttcaacagcactttccgctcagtcagtgaacttcccatcatgcaccaggactggctcaatggcaaggagttcaaatgcagggtcaacagtgcagctttccctgcccccatcgagaaaaccatctccaaaaccaaaggcagaccgaaggctccacaggtgtacaccattccacctcccaaggagcagatggccaaggataaagtcagtctgacctgcatgataacagacttcttccctgaagacattactgtggagtggcagtggaatgggcagccagcggagaactacaagaacactcagcccatcatggacacagatggctcttacttcatctacagcaagctcaatgtgcagaagagcaactgggaggcaggaaatactttcacctgctctgtgttacatgagggcctgcacaaccaccatactgagaagagcctctcccactctcctggtaaatga

SEQ ID NO: 189 - protein, 213 aa, Mus musculus
QIVLSQSPAFLSVSPGDKVTMTCRASSSISYIHWFQQKPGSSPRSWIYATSNLASGVPGRFSGSGSGTSYSLTISRVEAEDAATYYCQQWSSDPLTFGAGTKLELKRADAAPTVSIFPPSSEQLTSGGASVVCFLNNFYPKDINVKWKIDGSERQNGVLNSWTDQDSKDSTYSMSSTLTLTKDEYERHNSYTCEATHKTSTSPIVKSFNRNEC

SEQ ID NO: 190 - DNA, 642 bp, Mus musculus
caaattgttctctcccagtctccagcattcctgtctgtatctccaggggataaggtcacaatgacttgcagggccagctcaagtataagttacatacactggtttcagcagaagccaggatcctcccccagatcctggatttatgccacatccaacctggcttctggagtccctggtcgcttcagtggcagtgggtctgggacctcttactctctcacaatcagcagagtggaggctgaggatgctgccacttattactgccagcagtggagtagtgacccactcacgttcggtgctgggaccaagctggagctgaaacgggctgatgctgcaccaactgtatccatcttcccaccatccagtgagcagttaacatctggaggtgcctcagtcgtgtgcttcttgaacaacttctaccccaaagacatcaatgtcaagtggaagattgatggcagtgaacgacaaaatggcgtcctgaacagttggactgatcaggacagcaaagacagcacctacagcatgagcagcaccctcacgttgaccaaggacgagtatgaacgacataacagctatacctgtgaggccactcacaagacatcaacttcacccattgtcaagagcttcaacaggaatgagtgttag

SEQ ID NO: 191 - protein, 235 aa, Mus musculus
MDFQVQIFSFLLISASVIMSRGQIVLSQSPAFLSVSPGDKVTMTCRASSSISYIHWFQQKPGSSPRSWIYATSNLASGVPGRFSGSGSGTSYSLTISRVEAEDAATYYCQQWSSDPLTFGAGTKLELKRADAAPTVSIFPPSSEQLTSGGASVVCFLNNFYPKDINVKWKIDGSERQNGVLNSWTDQDSKDSTYSMSSTLTLTKDEYERHNSYTCEATHKTSTSPIVKSFNRNEC

SEQ ID NO: 192 - DNA, 708 bp, Mus musculus
atggattttcaagtgcagattttcagcttcctgctaatcagtgcttcagtcataatgtccagaggacaaattgttctctcccagtctccagcattcctgtctgtatctccaggggataaggtcacaatgacttgcagggccagctcaagtataagttacatacactggtttcagcagaagccaggatcctcccccagatcctggatttatgccacatccaacctggcttctggagtccctggtcgcttcagtggcagtgggtctgggacctcttactctctcacaatcagcagagtggaggctgaggatgctgccacttattactgccagcagtggagtagtgacccactcacgttcggtgctgggaccaagctggagctgaaacgggctgatgctgcaccaactgtatccatcttcccaccatccagtgagcagttaacatctggaggtgcctcagtcgtgtgcttcttgaacaacttctaccccaaagacatcaatgtcaagtggaagattgatggcagtgaacgacaaaatggcgtcctgaacagttggactgatcaggacagcaaagacagcacctacagcatgagcagcaccctcacgttgaccaaggacgagtatgaacgacataacagctatacctgtgaggccactcacaagacatcaacttcacccattgtcaagagcttcaacaggaatgagtgttag

SEQ ID NO: 193 - protein, 445 aa, Mus musculus
EVQLQQSGADLVQPGASVKVSCTASGFDIKDYYIHWMKQRPDQGLEWIGRVDPDNGETEFAPKFPGKATFTTDTSSNTAYLQLRGLTSEDTAIYYCGREDYDGTYTWFPYWGQGTLVTVSAAKTTPPSVYPLAPGSAAQTNSMVTLGCLVKGYFPEPVTVTWNSGSLSSGVHTFPAVLQSDLYTLSSSVTVPSSTWPSETVTCNVAHPASSTKVDKKIVPRDCGCKPCICTVPEVSSVFIFPPKPKDVLTITLTPKVTCVVVDISKDDPEVQFSWFVDDVEVHTAQTQPREEQFNSTFRSVSELPIMHQDWLNGKEFKCRVNSAAFPAPIEKTISKTKGRPKAPQVYTIPPPKEQMAKDKVSLTCMITDFFPEDITVEWQWNGQPAENYKNTQPIMDTDGSYFIYSKLNVQKSNWEAGNTFTCSVLHEGLHNHHTEKSLSHSPGK

SEQ ID NO: 194 - DNA, 1338 bp, Mus musculus
gaagttcagctgcaacagtctggggcagaccttgtgcagccaggggcctcagtcaaggtgtcctgcacagcttctggcttcgacattaaggactactatatacactggatgaaacagaggcctgaccagggcctggagtggattggaagggttgatcctgacaatggtgagactgaatttgccccgaagttcccgggcaaggccacttttacaacagacacatcctccaacacagcctacctacaactcagaggcctgacatctgaggacactgccatctattactgtgggagagaagactacgatggtacctacacctggtttccttattggggccaagggactctggtcactgtctctgcagccaaaacgacacccccatctgtctatccactggcccctggatctgctgcccaaactaactccatggtgaccctgggatgcctggtcaagggctatttccctgagccagtgacagtgacctggaactctggatccctgtccagcggtgtgcacaccttcccagctgtcctgcagtctgacctctacactctgagcagctcagtgactgtcccctccagcacctggcccagcgagaccgtcacctgcaacgttgcccacccggccagcagcaccaaggtggacaagaaaattgtgcccagggattgtggttgtaagccttgcatatgtacagtcccagaagtatcatctgtcttcatcttccccccaaagcccaaggatgtgctcaccattactctgactcctaaggtcacgtgtgttgtggtagacatcagcaaggatgatcccgaggtccagttcagctggtttgtagatgatgtggaggtgcacacagctcagacgcaaccccgggaggagcagttcaacagcactttccgctcagtcagtgaacttcccatcatgcaccaggactggctcaatggcaaggagttcaaatgcagggtcaacagtgcagctttccctgcccccatcgagaaaaccatctccaaaaccaaaggcagaccgaaggctccacaggtgtacaccattccacctcccaaggagcagatggccaaggataaagtcagtctgacctgcatgataacagacttcttccctgaagacattactgtggagtggcagtggaatgggcagccagcggagaactacaagaacactcagcccatcatggacacagatggctcttacttcatctacagcaagctcaatgtgcagaagagcaactgggaggcaggaaatactttcacctgctctgtgttacatgagggcctgcacaaccaccatactgagaagagcctctcccactctcctggtaaatga

SEQ ID NO: 195 - protein, 464 aa, Mus musculus
MKCSWVIFFLMAVVTGVNSEVQLQQSGADLVQPGASVKVSCTASGFDIKDYYIHWMKQRPDQGLEWIGRVDPDNGETEFAPKFPGKATFTTDTSSNTAYLQLRGLTSEDTAIYYCGREDYDGTYTWFPYWGQGTLVTVSAAKTTPPSVYPLAPGSAAQTNSMVTLGCLVKGYFPEPVTVTWNSGSLSSGVHTFPAVLQSDLYTLSSSVTVPSSTWPSETVTCNVAHPASSTKVDKKIVPRDCGCKPCICTVPEVSSVFIFPPKPKDVLTITLTPKVTCVVVDISKDDPEVQFSWFVDDVEVHTAQTQPREEQFNSTFRSVSELPIMHQDWLNGKEFKCRVNSAAFPAPIEKTISKTKGRPKAPQVYTIPPPKEQMAKDKVSLTCMITDFFPEDITVEWQWNGQPAENYKNTQPIMDTDGSYFIYSKLNVQKSNWEAGNTFTCSVLHEGLHNHHTEKSLSHSPGK

SEQ ID NO: 196 - DNA, 1395 bp, Mus musculus
atgaaatgcagctgggtcatcttcttcctgatggcagtggttacaggggtcaattcagaagttcagctgcaacagtctggggcagaccttgtgcagccaggggcctcagtcaaggtgtcctgcacagcttctggcttcgacattaaggactactatatacactggatgaaacagaggcctgaccagggcctggagtggattggaagggttgatcctgacaatggtgagactgaatttgccccgaagttcccgggcaaggccacttttacaacagacacatcctccaacacagcctacctacaactcagaggcctgacatctgaggacactgccatctattactgtgggagagaagactacgatggtacctacacctggtttccttattggggccaagggactctggtcactgtctctgcagccaaaacgacacccccatctgtctatccactggcccctggatctgctgcccaaactaactccatggtgaccctgggatgcctggtcaagggctatttccctgagccagtgacagtgacctggaactctggatccctgtccagcggtgtgcacaccttcccagctgtcctgcagtctgacctctacactctgagcagctcagtgactgtcccctccagcacctggcccagcgagaccgtcacctgcaacgttgcccacccggccagcagcaccaaggtggacaagaaaattgtgcccagggattgtggttgtaagccttgcatatgtacagtcccagaagtatcatctgtcttcatcttccccccaaagcccaaggatgtgctcaccattactctgactcctaaggtcacgtgtgttgtggtagacatcagcaaggatgatcccgaggtccagttcagctggtttgtagatgatgtggaggtgcacacagctcagacgcaaccccgggaggagcagttcaacagcactttccgctcagtcagtgaacttcccatcatgcaccaggactggctcaatggcaaggagttcaaatgcagggtcaacagtgcagctttccctgcccccatcgagaaaaccatctccaaaaccaaaggcagaccgaaggctccacaggtgtacaccattccacctcccaaggagcagatggccaaggataaagtcagtctgacctgcatgataacagacttcttccctgaagacattactgtggagtggcagtggaatgggcagccagcggagaactacaagaacactcagcccatcatggacacagatggctcttacttcatctacagcaagctcaatgtgcagaagagcaactgggaggcaggaaatactttcacctgctctgtgttacatgagggcctgcacaaccaccatactgagaagagcctctcccactctcctggtaaatga

SEQ ID NO: 197 - protein, 214 aa, Mus musculus
DLQMTQTTSSLSASLGDRVTISCRASQDISNYLNWYQQKPDGTVKLLIFYTSTLQSGVPSRFSGSGSGTNYSLTITNLEQDDAATYFCQQGDTLPYTFGGGTKLEIKRADAAPTVSIFPPSSEQLTSGGASVVCFLNNFYPKDINVKWKIDGSERQNGVLNSWTDQDSKDSTYSMSSTLTLTKDEYERHNSYTCEATHKTSTSPIVKSFNRNEC

SEQ ID NO: 198 - DNA, 645 bp, Mus musculus
gatctccagatgacacagactacttcctccctgtctgcctctctgggagacagagtcaccatcagttgcagggcaagtcaggacattagcaattatttaaactggtatcagcagaaaccagatggaactgttaagctcctgatcttctacacatcaacattacagtcaggagtcccatcgaggttcagtggcagtgggtctggaacaaattattctctcaccattaccaacctggagcaagatgatgctgccacttacttttgccaacagggtgatacgcttccgtacacgttcggaggggggaccaagctggaaataaaacgggctgatgctgcaccaactgtatccatcttcccaccatccagtgagcagttaacatctggaggtgcctcagtcgtgtgcttcttgaacaacttctaccccaaagacatcaatgtcaagtggaagattgatggcagtgaacgacaaaatggcgtcctgaacagttggactgatcaggacagcaaagacagcacctacagcatgagcagcaccctcacgttgaccaaggacgagtatgaacgacataacagctatacctgtgaggccactcacaagacatcaacttcacccattgtcaagagcttcaacaggaatgagtgttag

SEQ ID NO: 199 - protein, 234 aa, Mus musculus
MMSSAQFLGLLLLCFQGSRCDLQMTQTTSSLSASLGDRVTISCRASQDISNYLNWYQQKPDGTVKLLIFYTSTLQSGVPSRFSGSGSGTNYSLTITNLEQDDAATYFCQQGDTLPYTFGGGTKLEIKRADAAPTVSIFPPSSEQLTSGGASVVCFLNNFYPKDINVKWKIDGSERQNGVLNSWTDQDSKDSTYSMSSTLTLTKDEYERHNSYTCEATHKTSTSPIVKSFNRNEC

SEQ ID NO: 200 - DNA, 705 bp, Mus musculus
atgatgtcctctgctcagttccttggtctcctgttgctctgttttcaaggttccagatgtgatctccagatgacacagactacttcctccctgtctgcctctctgggagacagagtcaccatcagttgcagggcaagtcaggacattagcaattatttaaactggtatcagcagaaaccagatggaactgttaagctcctgatcttctacacatcaacattacagtcaggagtcccatcgaggttcagtggcagtgggtctggaacaaattattctctcaccattaccaacctggagcaagatgatgctgccacttacttttgccaacagggtgatacgcttccgtacacgttcggaggggggaccaagctggaaataaaacgggctgatgctgcaccaactgtatccatcttcccaccatccagtgagcagttaacatctggaggtgcctcagtcgtgtgcttcttgaacaacttctaccccaaagacatcaatgtcaagtggaagattgatggcagtgaacgacaaaatggcgtcctgaacagttggactgatcaggacagcaaagacagcacctacagcatgagcagcaccctcacgttgaccaaggacgagtatgaacgacataacagctatacctgtgaggccactcacaagacatcaacttcacccattgtcaagagcttcaacaggaatgagtgttag

SEQ ID NO: 201 - protein, 447 aa, Mus musculus
EVQLQQSGPELMKPGASVKMSCKASGYTFTDYNMHWMKQNQGKSLEWIGEINPNSGGSGYNQKFKGKATLTVDKSSSTAYMELRSLTSEDSAVYYCARLGYYGNYEDWYFDVWGAGTTVTVSSAKTTPPSVYPLAPGSAAQTNSMVTLGCLVKGYFPEPVTVTWNSGSLSSGVHTFPAVLQSDLYTLSSSVTVPSSTWPSETVTCNVAHPASSTKVDKKIVPRDCGCKPCICTVPEVSSVFIFPPKPKDVLTITLTPKVTCVVVDISKDDPEVQFSWFVDDVEVHTAQTQPREEQFNSTFRSVSELPIMHQDWLNGKEFKCRVNSAAFPAPIEKTISKTKGRPKAPQVYTIPPPKEQMAKDKVSLTCMITDFFPEDITVEWQWNGQPAENYKNTQPIMDTDGSYFIYSKLNVQKSNWEAGNTFTCSVLHEGLHNHHTEKSLSHSPGK

SEQ ID NO: 202 - DNA, 1344 bp, Mus musculus
gaggtccagttgcaacagtctggacctgaactaatgaagcctggggcttcagtgaagatgtcctgcaaggcttctggatacacattcactgactacaacatgcactggatgaagcagaaccaaggaaagagcctagagtggataggagagattaatcctaacagtggtggttctggttacaaccagaagttcaaaggcaaggccacattgactgtagacaagtcctccagcacagcctacatggagctccgcagcctgacatctgaggactctgcagtctattactgtgcaagattgggctactatggtaactacgaggactggtatttcgatgtctggggcgcagggaccacggtcaccgtctcctctgccaaaacgacacccccatctgtctatccactggcccctggatctgctgcccaaactaactccatggtgaccctgggatgcctggtcaagggctatttccctgagccagtgacagtgacctggaactctggatccctgtccagcggtgtgcacaccttcccagctgtcctgcagtctgacctctacactctgagcagctcagtgactgtcccctccagcacctggcccagcgagaccgtcacctgcaacgttgcccacccggccagcagcaccaaggtggacaagaaaattgtgcccagggattgtggttgtaagccttgcatatgtacagtcccagaagtatcatctgtcttcatcttccccccaaagcccaaggatgtgctcaccattactctgactcctaaggtcacgtgtgttgtggtagacatcagcaaggatgatcccgaggtccagttcagctggtttgtagatgatgtggaggtgcacacagctcagacgcaaccccgggaggagcagttcaacagcactttccgctcagtcagtgaacttcccatcatgcaccaggactggctcaatggcaaggagttcaaatgcagggtcaacagtgcagctttccctgcccccatcgagaaaaccatctccaaaaccaaaggcagaccgaaggctccacaggtgtacaccattccacctcccaaggagcagatggccaaggataaagtcagtctgacctgcatgataacagacttcttccctgaagacattactgtggagtggcagtggaatgggcagccagcggagaactacaagaacactcagcccatcatggacacagatggctcttacttcatctacagcaagctcaatgtgcagaagagcaactgggaggcaggaaatactttcacctgctctgtgttacatgagggcctgcacaaccaccatactgagaagagcctctcccactctcctggtaaatga

SEQ ID NO: 203 - protein, 466 aa, Mus musculus
MGWSWTFLFLLSGTSGVLSEVQLQQSGPELMKPGASVKMSCKASGYTFTDYNMHWMKQNQGKSLEWIGEINPNSGGSGYNQKFKGKATLTVDKSSSTAYMELRSLTSEDSAVYYCARLGYYGNYEDWYFDVWGAGTTVTVSSAKTTPPSVYPLAPGSAAQTNSMVTLGCLVKGYFPEPVTVTWNSGSLSSGVHTFPAVLQSDLYTLSSSVTVPSSTWPSETVTCNVAHPASSTKVDKKIVPRDCGCKPCICTVPEVSSVFIFPPKPKDVLTITLTPKVTCVVVDISKDDPEVQFSWFVDDVEVHTAQTQPREEQFNSTFRSVSELPIMHQDWLNGKEFKCRVNSAAFPAPIEKTISKTKGRPKAPQVYTIPPPKEQMAKDKVSLTCMITDFFPEDITVEWQWNGQPAENYKNTQPIMDTDGSYFIYSKLNVQKSNWEAGNTFTCSVLHEGLHNHHTEKSLSHSPGK

SEQ ID NO: 204 - DNA, 1401 bp, Mus musculus
atgggatggagctggacctttctcttcctcctgtcaggaacttcgggtgtcctctctgaggtccagttgcaacagtctggacctgaactaatgaagcctggggcttcagtgaagatgtcctgcaaggcttctggatacacattcactgactacaacatgcactggatgaagcagaaccaaggaaagagcctagagtggataggagagattaatcctaacagtggtggttctggttacaaccagaagttcaaaggcaaggccacattgactgtagacaagtcctccagcacagcctacatggagctccgcagcctgacatctgaggactctgcagtctattactgtgcaagattgggctactatggtaactacgaggactggtatttcgatgtctggggcgcagggaccacggtcaccgtctcctctgccaaaacgacacccccatctgtctatccactggcccctggatctgctgcccaaactaactccatggtgaccctgggatgcctggtcaagggctatttccctgagccagtgacagtgacctggaactctggatccctgtccagcggtgtgcacaccttcccagctgtcctgcagtctgacctctacactctgagcagctcagtgactgtcccctccagcacctggcccagcgagaccgtcacctgcaacgttgcccacccggccagcagcaccaaggtggacaagaaaattgtgcccagggattgtggttgtaagccttgcatatgtacagtcccagaagtatcatctgtcttcatcttccccccaaagcccaaggatgtgctcaccattactctgactcctaaggtcacgtgtgttgtggtagacatcagcaaggatgatcccgaggtccagttcagctggtttgtagatgatgtggaggtgcacacagctcagacgcaaccccgggaggagcagttcaacagcactttccgctcagtcagtgaacttcccatcatgcaccaggactggctcaatggcaaggagttcaaatgcagggtcaacagtgcagctttccctgcccccatcgagaaaaccatctccaaaaccaaaggcagaccgaaggctccacaggtgtacaccattccacctcccaaggagcagatggccaaggataaagtcagtctgacctgcatgataacagacttcttccctgaagacattactgtggagtggcagtggaatgggcagccagcggagaactacaagaacactcagcccatcatggacacagatggctcttacttcatctacagcaagctcaatgtgcagaagagcaactgggaggcaggaaatactttcacctgctctgtgttacatgagggcctgcacaaccaccatactgagaagagcctctcccactctcctggtaaatga

SEQ ID NO: 205 - protein, 215 aa, Mus musculus
QIVLTQSPAIMSASPGEKVTMTCRASSSVTSSYLNWYQQKPGSSPKLWIYSTSNLASGVPARFSGSGSGTSYSLTISSVEAEDAATYYCQQYDFFPSTFGGGTKLEIKRADAAPTVSIFPPSSEQLTSGGASVVCFLNNFYPKDINVKWKIDGSERQNGVLNSWTDQDSKDSTYSMSSTLTLTKDEYERHNSYTCEATHKTSTSPIVKSFNRNEC

SEQ ID NO: 206 - DNA, 645 bp, Mus musculus
cagattgttctcacccagtctccagcaatcatgtctgcatctccaggggagaaggtcaccatgacctgcagggccagctcaagtgtaacttccagttacttgaactggtaccagcagaagccaggatcttcccccaaactctggatttatagcacatccaacctggcttcaggagtcccagctcgcttcagtggcagtgggtctgggacctcttactctctcacaatcagcagtgtggaggctgaggatgctgccacttattactgccagcagtatgattttttcccatcgacgttcggtggaggcaccaagctggaaatcaagcgggctgatgctgcaccaactgtatccatcttcccaccatccagtgagcagttaacatctggaggtgcctcagtcgtgtgcttcttgaacaacttctaccccaaagacatcaatgtcaagtggaagattgatggcagtgaacgacaaaatggcgtcctgaacagttggactgatcaggacagcaaagacagcacctacagcatgagcagcaccctcacgttgaccaaggacgagtatgaacgacataacagctatacctgtgaggccactcacaagacatcaacttcacccatcgtcaagagcttcaacaggaatgagtgt

SEQ ID NO: 207 - protein, 237 aa, Mus musculus
MDSQVQIFSFLLISALVKMSRGQIVLTQSPAIMSASPGEKVTMTCRASSSVTSSYLNWYQQKPGSSPKLWIYSTSNLASGVPARFSGSGSGTSYSLTISSVEAEDAATYYCQQYDFFPSTFGGGTKLEIKRADAAPTVSIFPPSSEQLTSGGASVVCFLNNFYPKDINVKWKIDGSERQNGVLNSWTDQDSKDSTYSMSSTLTLTKDEYERHNSYTCEATHKTSTSPIVKSFNRNEC

SEQ ID NO: 208 - DNA, 711 bp, Mus musculus
atggattctcaagtgcagattttcagcttccttctaatcagtgccttagtcaaaatgtccagaggacagattgttctcacccagtctccagcaatcatgtctgcatctccaggggagaaggtcaccatgacctgcagggccagctcaagtgtaacttccagttacttgaactggtaccagcagaagccaggatcttcccccaaactctggatttatagcacatccaacctggcttcaggagtcccagctcgcttcagtggcagtgggtctgggacctcttactctctcacaatcagcagtgtggaggctgaggatgctgccacttattactgccagcagtatgattttttcccatcgacgttcggtggaggcaccaagctggaaatcaagcgggctgatgctgcaccaactgtatccatcttcccaccatccagtgagcagttaacatctggaggtgcctcagtcgtgtgcttcttgaacaacttctaccccaaagacatcaatgtcaagtggaagattgatggcagtgaacgacaaaatggcgtcctgaacagttggactgatcaggacagcaaagacagcacctacagcatgagcagcaccctcacgttgaccaaggacgagtatgaacgacataacagctatacctgtgaggccactcacaagacatcaacttcacccatcgtcaagagcttcaacaggaatgagtgt

SEQ ID NO: 209 - protein, 445 aa, Mus musculus
EVQLQQSGPELVKPGASVKMSCKASGYTFTDYYMNWVKQSHGESLEWIGDINPYNDDTTYNHKFKGKATLTVDKSSNTAYMQLNSLTSEDSAVYYCARETAVITTNAMDYWGQGTSVTVSSAKTTPPSVYPLAPGSAAQTNSMVTLGCLVKGYFPEPVTVTWNSGSLSSGVHTFPAVLQSDLYTLSSSVTVPSSTWPSETVTCNVAHPASSTKVDKKIVPRDCGCKPCICTVPEVSSVFIFPPKPKDVLTITLTPKVTCVVVDISKDDPEVQFSWFVDDVEVHTAQTQPREEQFNSTFRSVSELPIMHQDWLNGKEFKCRVNSAAFPAPIEKTISKTKGRPKAPQVYTIPPPKEQMAKDKVSLTCMITDFFPEDITVEWQWNGQPAENYKNTQPIMDTDGSYFIYSKLNVQKSNWEAGNTFTCSVLHEGLHNHHTEKSLSHSPGK

SEQ ID NO: 210 - DNA, 1335 bp, Mus musculus
gaggtccagctgcaacaatctggacctgagctggtgaagcctggggcttcagtgaagatgtcctgtaaggcttctggatacacattcactgactactacatgaactgggtgaagcagagccatggagagagccttgagtggattggagatattaatccttacaacgatgatactacctacaaccacaagttcaagggcaaggccacattgactgtagacaaatcctccaacacagcctacatgcagctcaacagcctgacatctgaggactctgcagtctattactgtgcaagagagacggccgttattactacgaatgctatggactactggggtcaaggaacctcagtcaccgtctcctcagccaaaacgacacccccatctgtctatccactggcccctggatctgctgcccaaactaactccatggtgaccctgggatgcctggtcaagggctatttccctgagccagtgacagtgacctggaactctggatccctgtccagcggtgtgcacaccttcccagctgtcctgcagtctgacctctacactctgagcagctcagtgactgtcccctccagcacctggcccagcgagaccgtcacctgcaacgttgcccacccggccagcagcaccaaggtggacaagaaaattgtgcccagggattgtggttgtaagccttgcatatgtacagtcccagaagtatcatctgtcttcatcttccccccaaagcccaaggatgtgctcaccattactctgactcctaaggtcacgtgtgttgtggtagacatcagcaaggatgatcccgaggtccagttcagctggtttgtagatgatgtggaggtgcacacagctcagacgcaaccccgggaggagcagttcaacagcactttccgctcagtcagtgaacttcccatcatgcaccaggactggctcaatggcaaggagttcaaatgcagggtcaacagtgcagctttccctgcccccatcgagaaaaccatctccaaaaccaaaggcagaccgaaggctccacaggtgtacaccattccacctcccaaggagcagatggccaaggataaagtcagtctgacctgcatgataacagacttcttccctgaagacattactgtggagtggcagtggaatgggcagccagcggagaactacaagaacactcagcccatcatggacacagatggctcttacttcatctacagcaagctcaatgtgcagaagagcaactgggaggcaggaaatactttcacctgctctgtgttacatgagggcctgcacaaccaccatactgagaagagcctctcccactctcctggtaaa

SEQ ID NO: 211 - protein, 464 aa, Mus musculus
MGWNWIFLFLLSGTAGVYSEVQLQQSGPELVKPGASVKMSCKASGYTFTDYYMNWVKQSHGESLEWIGDINPYNDDTTYNHKFKGKATLTVDKSSNTAYMQLNSLTSEDSAVYYCARETAVITTNAMDYWGQGTSVTVSSAKTTPPSVYPLAPGSAAQTNSMVTLGCLVKGYFPEPVTVTWNSGSLSSGVHTFPAVLQSDLYTLSSSVTVPSSTWPSETVTCNVAHPASSTKVDKKIVPRDCGCKPCICTVPEVSSVFIFPPKPKDVLTITLTPKVTCVVVDISKDDPEVQFSWFVDDVEVHTAQTQPREEQFNSTFRSVSELPIMHQDWLNGKEFKCRVNSAAFPAPIEKTISKTKGRPKAPQVYTIPPPKEQMAKDKVSLTCMITDFFPEDITVEWQWNGQPAENYKNTQPIMDTDGSYFIYSKLNVQKSNWEAGNTFTCSVLHEGLHNHHTEKSLSHSPGK

SEQ ID NO: 212 - DNA, 1392 bp, Mus musculus
atgggatggaactggatctttctcttcctcttgtcaggaactgcaggtgtctactctgaggtccagctgcaacaatctggacctgagctggtgaagcctggggcttcagtgaagatgtcctgtaaggcttctggatacacattcactgactactacatgaactgggtgaagcagagccatggagagagccttgagtggattggagatattaatccttacaacgatgatactacctacaaccacaagttcaagggcaaggccacattgactgtagacaaatcctccaacacagcctacatgcagctcaacagcctgacatctgaggactctgcagtctattactgtgcaagagagacggccgttattactacgaatgctatggactactggggtcaaggaacctcagtcaccgtctcctcagccaaaacgacacccccatctgtctatccactggcccctggatctgctgcccaaactaactccatggtgaccctgggatgcctggtcaagggctatttccctgagccagtgacagtgacctggaactctggatccctgtccagcggtgtgcacaccttcccagctgtcctgcagtctgacctctacactctgagcagctcagtgactgtcccctccagcacctggcccagcgagaccgtcacctgcaacgttgcccacccggccagcagcaccaaggtggacaagaaaattgtgcccagggattgtggttgtaagccttgcatatgtacagtcccagaagtatcatctgtcttcatcttccccccaaagcccaaggatgtgctcaccattactctgactcctaaggtcacgtgtgttgtggtagacatcagcaaggatgatcccgaggtccagttcagctggtttgtagatgatgtggaggtgcacacagctcagacgcaaccccgggaggagcagttcaacagcactttccgctcagtcagtgaacttcccatcatgcaccaggactggctcaatggcaaggagttcaaatgcagggtcaacagtgcagctttccctgcccccatcgagaaaaccatctccaaaaccaaaggcagaccgaaggctccacaggtgtacaccattccacctcccaaggagcagatggccaaggataaagtcagtctgacctgcatgataacagacttcttccctgaagacattactgtggagtggcagtggaatgggcagccagcggagaactacaagaacactcagcccatcatggacacagatggctcttacttcatctacagcaagctcaatgtgcagaagagcaactgggaggcaggaaatactttcacctgctctgtgttacatgagggcctgcacaaccaccatactgagaagagcctctcccactctcctggtaaa

SEQ ID NO: 213 - protein, 215 aa, Artificial Sequence
  Synthetic Polypeptide
  MISC_FEATURE: Humanized Antibody Sequence
DIQLTQSPSFLSASVGDRVTITCRASSSVTSSYLNWYQQKPGKAPKLLIYSTSNLASGVPSRFSGSGSGTEFTLTISSLQPEDFATYYCQQYDFFPSTFGGGTKVEIKRTVAAPSVFIFPPSDEQLKSGTASVVCLLNNFYPREAKVQWKVDNALQSGNSQESVTEQDSKDSTYSLSSTLTLSKADYEKHKVYACEVTHQGLSSPVTKSFNRGEC

SEQ ID NO: 214 - DNA, 645 bp, Artificial Sequence
  Synthetic Polynucleotide
  misc_feature: Humanized Antibody Sequence
gacatccagctgacccagagccccagcttcctttccgcatccgttggtgaccgagtaacaatcacatgccgcgcctcatcttcagttacatcttcttatcttaattggtatcaacaaaaaccaggaaaagcacctaaacttcttatatactctacatctaatctcgcatcaggagttccctctcgattttcaggatctggatcaggcacagaatttacacttactatatcatcactccaaccagaagacttcgccacttattactgccaacaatacgatttttttccaagcacattcggaggaggtacaaaagtagaaatcaagcgtacggtggctgcaccatctgtcttcatcttcccgccatctgatgagcagttgaaatctggaactgcctctgttgtgtgcctgctgaataacttctatcccagagaggccaaagtacagtggaaggtggataacgccctccaatcgggtaactcccaggagagtgtcacagagcaggacagcaaggacagcacctacagcctcagcagcaccctgacgctgagcaaagcagactacgagaaacacaaagtctacgcctgcgaagtcacccatcagggcctgagctcgcccgtcacaaagagcttcaacaggggagagtgt

SEQ ID NO: 215 - protein, 237 aa, Artificial Sequence
  Synthetic Polypeptide
  MISC_FEATURE: Humanized Antibody Sequence
MDMRVPAQLLGLLLLWLPGARCDIQLTQSPSFLSASVGDRVTITCRASSSVTSSYLNWYQQKPGKAPKLLIYSTSNLASGVPSRFSGSGSGTEFTLTISSLQPEDFATYYCQQYDFFPSTFGGGTKVEIKRTVAAPSVFIFPPSDEQLKSGTASVVCLLNNFYPREAKVQWKVDNALQSGNSQESVTEQDSKDSTYSLSSTLTLSKADYEKHKVYACEVTHQGLSSPVTKSFNRGEC

SEQ ID NO: 216 - DNA, 711 bp, Artificial Sequence
  Synthetic Polynucleotide
  misc_feature: Humanized Antibody Sequence
atggacatgagggtccccgctcagctcctggggctcctgctactctggctcccaggtgccagatgtgacatccagctgacccagagccccagcttcctttccgcatccgttggtgaccgagtaacaatcacatgccgcgcctcatcttcagttacatcttcttatcttaattggtatcaacaaaaaccaggaaaagcacctaaacttcttatatactctacatctaatctcgcatcaggagttccctctcgattttcaggatctggatcaggcacagaatttacacttactatatcatcactccaaccagaagacttcgccacttattactgccaacaatacgatttttttccaagcacattcggaggaggtacaaaagtagaaatcaagcgtacggtggctgcaccatctgtcttcatcttcccgccatctgatgagcagttgaaatctggaactgcctctgttgtgtgcctgctgaataacttctatcccagagaggccaaagtacagtggaaggtggataacgccctccaatcgggtaactcccaggagagtgtcacagagcaggacagcaaggacagcacctacagcctcagcagcaccctgacgctgagcaaagcagactacgagaaacacaaagtctacgcctgcgaagtcacccatcagggcctgagctcgcccgtcacaaagagcttcaacaggggagagtgt

SEQ ID NO: 217 - protein, 447 aa, Artificial Sequence
  Synthetic Polypeptide
  MISC_FEATURE: Humanized Antibody Sequence
EVQLVQSGAEVKKPGASVKVSCKASGYTFTDYYMNWVRQAPGQRLEWMGDINPYNDDTTYNHKFKGRVTITRDTSASTAYMELSSLRSEDTAVYYCARETAVITTNAMDYWGQGTTVTVSSASTKGPSVFPLAPCSRSTSESTAALGCLVKDYFPEPVTVSWNSGALTSGVHTFPAVLQSSGLYSLSSVVTVPSSNFGTQTYTCNVDHKPSNTKVDKTVERKCCVECPPCPAPPVAGPSVFLFPPKPKDTLMISRTPEVTCVVVDVSHEDPEVQFNWYVDGVEVHNAKTKPREEQFNSTFRVVSVLTVVHQDWLNGKEYKCKVSNKGLPAPIEKTISKTKGQPREPQVYTLPPSREEMTKNQVSLTCLVKGFYPSDIAVEWESNGQPENNYKTTPPMLDSDGSFFLYSKLTVDKSRWQQGNVFSCSVMHEALHNHYTQKSLSLSPGK

SEQ ID NO: 218 - DNA, 1341 bp, Artificial Sequence
  Synthetic Polynucleotide
  misc_feature: Humanized Antibody Sequence
gaggtgcagctggtgcagagcggcgccgaggtcaagaaacctggagcaagcgtaaaggttagttgcaaagcatctggatacacatttaccgactactacatgaattgggtacgacaagcccctggacaaagacttgaatggatgggagacattaacccttataacgacgacactacatacaatcataaatttaaaggaagagttacaattacaagagatacatccgcatcaaccgcctatatggaactttcctcattgagatctgaagacactgctgtttattactgtgcaagagaaactgccgttattactactaacgctatggattactggggtcaaggaaccactgttaccgtctctagtgcctccaccaagggcccatcggtcttccccctggcgccctgctccaggagcacctccgagagcacagcggccctgggctgcctggtcaaggactacttccccgaaccggtgacggtgtcgtggaactcaggcgctctgaccagcggcgtgcacaccttcccagctgtcctacagtcctcaggactctactccctcagcagcgtggtgaccgtgccctccagcaacttcggcacccagacctacacctgcaacgtagatcacaagcccagcaacaccaaggtggacaagacagttgagcgcaaatgttgtgtcgagtgcccaccgtgcccagcaccacctgtggcaggaccgtcagtcttcctcttccccccaaaacccaaggacaccctcatgatctcccggacccctgaggtcacgtgcgtggtggtggacgtgagccacgaagaccccgaggtccagttcaactggtacgtggacggcgtggaggtgcataatgccaagacaaagccacgggaggagcagttcaacagcacgttccgtgtggtcagcgtcctcaccgttgtgcaccaggactggctgaacggcaaggagtacaagtgcaaggtctccaacaaaggcctcccagcccccatcgagaaaaccatctccaaaaccaaagggcagccccgagaaccacaggtgtacaccctgcccccatcccgggaggagatgaccaagaaccaggtcagcctgacctgcctggtcaaaggcttctaccccagcgacatcgccgtggagtgggagagcaatgggcagccggagaacaactacaagaccacacctcccatgctggactccgacggctccttcttcctctacagcaagctcaccgtggacaagagcaggtggcagcaggggaacgtcttctcatgctccgtgatgcatgaggctctgcacaaccactacacgcagaagagcctctccctgtctccgggtaaa

SEQ ID NO: 219 - protein, 466 aa, Artificial Sequence
  Synthetic Polypeptide
  MISC_FEATURE: Humanized Antibody Sequence
MDWTWRILFLVAAATGAHSEVQLVQSGAEVKKPGASVKVSCKASGYTFTDYYMNWVRQAPGQRLEWMGDINPYNDDTTYNHKFKGRVTITRDTSASTAYMELSSLRSEDTAVYYCARETAVITTNAMDYWGQGTTVTVSSASTKGPSVFPLAPCSRSTSESTAALGCLVKDYFPEPVTVSWNSGALTSGVHTFPAVLQSSGLYSLSSVVTVPSSNFGTQTYTCNVDHKPSNTKVDKTVERKCCVECPPCPAPPVAGPSVFLFPPKPKDTLMISRTPEVTCVVVDVSHEDPEVQFNWYVDGVEVHNAKTKPREEQFNSTFRVVSVLTVVHQDWLNGKEYKCKVSNKGLPAPIEKTISKTKGQPREPQVYTLPPSREEMTKNQVSLTCLVKGFYPSDIAVEWESNGQPENNYKTTPPMLDSDGSFFLYSKLTVDKSRWQQGNVFSCSVMHEALHNHYTQKSLSLSPGK

SEQ ID NO: 220 - DNA, 1398 bp, Artificial Sequence
  Synthetic Polynucleotide
  misc_feature: Humanized Antibody Sequence
atggactggacctggaggatcctcttcttggtggcagcagccacaggagcccactccgaggtgcagctggtgcagagcggcgccgaggtcaagaaacctggagcaagcgtaaaggttagttgcaaagcatctggatacacatttaccgactactacatgaattgggtacgacaagcccctggacaaagacttgaatggatgggagacattaacccttataacgacgacactacatacaatcataaatttaaaggaagagttacaattacaagagatacatccgcatcaaccgcctatatggaactttcctcattgagatctgaagacactgctgtttattactgtgcaagagaaactgccgttattactactaacgctatggattactggggtcaaggaaccactgttaccgtctctagtgcctccaccaagggcccatcggtcttccccctggcgccctgctccaggagcacctccgagagcacagcggccctgggctgcctggtcaaggactacttccccgaaccggtgacggtgtcgtggaactcaggcgctctgaccagcggcgtgcacaccttcccagctgtcctacagtcctcaggactctactccctcagcagcgtggtgaccgtgccctccagcaacttcggcacccagacctacacctgcaacgtagatcacaagcccagcaacaccaaggtggacaagacagttgagcgcaaatgttgtgtcgagtgcccaccgtgcccagcaccacctgtggcaggaccgtcagtcttcctcttccccccaaaacccaaggacaccctcatgatctcccggacccctgaggtcacgtgcgtggtggtggacgtgagccacgaagaccccgaggtccagttcaactggtacgtggacggcgtggaggtgcataatgccaagacaaagccacgggaggagcagttcaacagcacgttccgtgtggtcagcgtcctcaccgttgtgcaccaggactggctgaacggcaaggagtacaagtgcaaggtctccaacaaaggcctcccagcccccatcgagaaaaccatctccaaaaccaaagggcagccccgagaaccacaggtgtacaccctgcccccatcccgggaggagatgaccaagaaccaggtcagcctgacctgcctggtcaaaggcttctaccccagcgacatcgccgtggagtgggagagcaatgggcagccggagaacaactacaagaccacacctcccatgctggactccgacggctccttcttcctctacagcaagctcaccgtggacaagagcaggtggcagcaggggaacgtcttctcatgctccgtgatgcatgaggctctgcacaaccactacacgcagaagagcctctccctgtctccgggtaaa

SEQ ID NO: 221 - protein, 215 aa, Artificial Sequence
  Synthetic Polypeptide
  MISC_FEATURE: Humanized Antibody Sequence
DIQMTQSPSSLSASVGDRVTITCSVSSTISSNHLHWFQQKPGKAPKSLIYGTSNLASGVPSRFSGSGSGTDFTLTISSLQPEDFATYYCQQWSSYPLTFGGGTKVEIKRTVAAPSVFIFPPSDEQLKSGTASVVCLLNNFYPREAKVQWKVDNALQSGNSQESVTEQDSKDSTYSLSSTLTLSKADYEKHKVYACEVTHQGLSSPVTKSFNRGEC

SEQ ID NO: 222 - DNA, 645 bp, Artificial Sequence
  Synthetic Polynucleotide
  misc_feature: Humanized Antibody Sequence
gacatccagatgacccagtctccatcctccctctcagcatccgtaggcgatagagttacaataacatgcagcgtatcatcaactatatcatcaaatcatcttcattggttccaacagaaacccggcaaagcacctaaatcacttatatacggcacatcaaatctcgcatcaggcgttccttcaagattttcaggctctggctcaggcaccgactttactcttacaatatcctccctccaacccgaagacttcgcaacctattactgtcaacaatggtcctcatatccactcacatttggcggcggcacaaaagtagaaattaaacgtacggtggctgcaccatctgtcttcatcttcccgccatctgatgagcagttgaaatctggaactgcctctgttgtgtgcctgctgaataacttctatcccagagaggccaaagtacagtggaaggtggataacgccctccaatcgggtaactcccaggagagtgtcacagagcaggacagcaaggacagcacctacagcctcagcagcaccctgacgctgagcaaagcagactacgagaaacacaaagtctacgcctgcgaagtcacccatcagggcctgagctcgcccgtcacaaagagcttcaacaggggagagtgt

SEQ ID NO: 223 - protein, 237 aa, Artificial Sequence
  Synthetic Polypeptide
  MISC_FEATURE: Humanized Antibody Sequence
MDMRVPAQLLGLLLLWLRGARCDIQMTQSPSSLSASVGDRVTITCSVSSTISSNHLHWFQQKPGKAPKSLIYGTSNLASGVPSRFSGSGSGTDFTLTISSLQPEDFATYYCQQWSSYPLTFGGGTKVEIKRTVAAPSVFIFPPSDEQLKSGTASVVCLLNNFYPREAKVQWKVDNALQSGNSQESVTEQDSKDSTYSLSSTLTLSKADYEKHKVYACEVTHQGLSSPVTKSFNRGEC

SEQ ID NO: 224 - DNA, 711 bp, Artificial Sequence
  Synthetic Polynucleotide
  misc_feature: Humanized Antibody Sequence
atggacatgagggtccccgctcagctcctggggctcctgctactctggctccgaggtgccagatgtgacatccagatgacccagtctccatcctccctctcagcatccgtaggcgatagagttacaataacatgcagcgtatcatcaactatatcatcaaatcatcttcattggttccaacagaaacccggcaaagcacctaaatcacttatatacggcacatcaaatctcgcatcaggcgttccttcaagattttcaggctctggctcaggcaccgactttactcttacaatatcctccctccaacccgaagacttcgcaacctattactgtcaacaatggtcctcatatccactcacatttggcggcggcacaaaagtagaaattaaacgtacggtggctgcaccatctgtcttcatcttcccgccatctgatgagcagttgaaatctggaactgcctctgttgtgtgcctgctgaataacttctatcccagagaggccaaagtacagtggaaggtggataacgccctccaatcgggtaactcccaggagagtgtcacagagcaggacagcaaggacagcacctacagcctcagcagcaccctgacgctgagcaaagcagactacgagaaacacaaagtctacgcctgcgaagtcacccatcagggcctgagctcgcccgtcacaaagagcttcaacaggggagagtgt

SEQ ID NO: 225 - protein, 451 aa, Artificial Sequence
  Synthetic Polypeptide
  MISC_FEATURE: Humanized Antibody Sequence
EVQLVQSGAEVKKPGASVKVSCKASDFNIKDFYLHWVRQAPGQGLEWIGRIDPENGDTLYDPKFQDKVTMTTDTSTSTAYMELRSLRSDDTAVYYCAREADYFHDGTSYWYFDVWGRGTLVTVSSASTKGPSVFPLAPCSRSTSESTAALGCLVKDYFPEPVTVSWNSGALTSGVHTFPAVLQSSGLYSLSSVVTVPSSNFGTQTYTCNVDHKPSNTKVDKTVERKCCVECPPCPAPPVAGPSVFLFPPKPKDTLMISRTPEVTCVVVDVSHEDPEVQFNWYVDGVEVHNAKTKPREEQFNSTFRVVSVLTVVHQDWLNGKEYKCKVSNKGLPAPIEKTISKTKGQPREPQVYTLPPSREEMTKNQVSLTCLVKGFYPSDIAVEWESNGQPENNYKTTPPMLDSDGSFFLYSKLTVDKSRWQQGNVFSCSVMHEALHNHYTQKSLSLSPGK

SEQ ID NO: 226 - DNA, 1353 bp, Artificial Sequence
  Synthetic Polynucleotide
gaggtgcagctggtgcagtctggggctgaggtgaagaagcctggggcctcagtgaaggtctcctgcaaggcttctgacttcaacattaaagacttctatctacactgggtgcgacaggcccctggacaagggcttgagtggattggaaggattgatcctgagaatggtgatactttatatgacccgaagttccaggacaaggtcaccatgaccacagacacgtccaccagcacagcctacatggagctgaggagcctgagatctgacgacacggccgtgtattactgtgcgagagaggcggattatttccacgatggtacctcctactggtacttcgatgtctggggccgtggcaccctggtcaccgtctctagtgcctccaccaagggcccatcggtcttccccctggcgccctgctccaggagcacctccgagagcacagcggccctgggctgcctggtcaaggactacttccccgaaccggtgacggtgtcgtggaactcaggcgctctgaccagcggcgtgcacaccttcccagctgtcctacagtcctcaggactctactccctcagcagcgtggtgaccgtgccctccagcaacttcggcacccagacctacacctgcaacgtagatcacaagcccagcaacaccaaggtggacaagacagttgagcgcaaatgttgtgtcgagtgcccaccgtgcccagcaccacctgtggcaggaccgtcagtcttcctcttccccccaaaacccaaggacaccctcatgatctcccggacccctgaggtcacgtgcgtggtggtggacgtgagccacgaagaccccgaggtccagttcaactggtacgtggacggcgtggaggtgcataatgccaagacaaagccacgggaggagcagttcaacagcacgttccgtgtggtcagcgtcctcaccgttgtgcaccaggactggctgaacggcaaggagtacaagtgcaaggtctccaacaaaggcctcccagcccccatcgagaaaaccatctccaaaaccaaagggcagccccgagaaccacaggtgtacaccctgcccccatcccgggaggagatgaccaagaaccaggtcagcctgacctgcctggtcaaaggcttctaccccagcgacatcgccgtggagtgggagagcaatgggcagccggagaacaactacaagaccacacctcccatgctggactccgacggctccttcttcctctacagcaagctcaccgtggacaagagcaggtggcagcaggggaacgtcttctcatgctccgtgatgcatgaggctctgcacaaccactacacgcagaagagcctctccctgtctccgggtaaa

SEQ ID NO: 227 - protein, 470 aa, Artificial Sequence
  Synthetic Polypeptide
  MISC_FEATURE: Humanized Antibody Sequence
MDWTWRILFLVAAATGAHSEVQLVQSGAEVKKPGASVKVSCKASDFNIKDFYLHWVRQAPGQGLEWIGRIDPENGDTLYDPKFQDKVTMTTDTSTSTAYMELRSLRSDDTAVYYCAREADYFHDGTSYWYFDVWGRGTLVTVSSASTKGPSVFPLAPCSRSTSESTAALGCLVKDYFPEPVTVSWNSGALTSGVHTFPAVLQSSGLYSLSSVVTVPSSNFGTQTYTCNVDHKPSNTKVDKTVERKCCVECPPCPAPPVAGPSVFLFPPKPKDTLMISRTPEVTCVVVDVSHEDPEVQFNWYVDGVEVHNAKTKPREEQFNSTFRVVSVLTVVHQDWLNGKEYKCKVSNKGLPAPIEKTISKTKGQPREPQVYTLPPSREEMTKNQVSLTCLVKGFYPSDIAVEWESNGQPENNYKTTPPMLDSDGSFFLYSKLTVDKSRWQQGNVFSCSVMHEALHNHYTQKSLSLSPGK

SEQ ID NO: 228 - DNA, 1410 bp, Artificial Sequence
  Synthetic Polynucleotide
  misc_feature: Humanized Antibody Sequence
atggactggacctggaggatcctcttcttggtggcagcagccacaggagcccactccgaggtgcagctggtgcagtctggggctgaggtgaagaagcctggggcctcagtgaaggtctcctgcaaggcttctgacttcaacattaaagacttctatctacactgggtgcgacaggcccctggacaagggcttgagtggattggaaggattgatcctgagaatggtgatactttatatgacccgaagttccaggacaaggtcaccatgaccacagacacgtccaccagcacagcctacatggagctgaggagcctgagatctgacgacacggccgtgtattactgtgcgagagaggcggattatttccacgatggtacctcctactggtacttcgatgtctggggccgtggcaccctggtcaccgtctctagtgcctccaccaagggcccatcggtcttccccctggcgccctgctccaggagcacctccgagagcacagcggccctgggctgcctggtcaaggactacttccccgaaccggtgacggtgtcgtggaactcaggcgctctgaccagcggcgtgcacaccttcccagctgtcctacagtcctcaggactctactccctcagcagcgtggtgaccgtgccctccagcaacttcggcacccagacctacacctgcaacgtagatcacaagcccagcaacaccaaggtggacaagacagttgagcgcaaatgttgtgtcgagtgcccaccgtgcccagcaccacctgtggcaggaccgtcagtcttcctcttccccccaaaacccaaggacaccctcatgatctcccggacccctgaggtcacgtgcgtggtggtggacgtgagccacgaagaccccgaggtccagttcaactggtacgtggacggcgtggaggtgcataatgccaagacaaagccacgggaggagcagttcaacagcacgttccgtgtggtcagcgtcctcaccgttgtgcaccaggactggctgaacggcaaggagtacaagtgcaaggtctccaacaaaggcctcccagcccccatcgagaaaaccatctccaaaaccaaagggcagccccgagaaccacaggtgtacaccctgcccccatcccgggaggagatgaccaagaaccaggtcagcctgacctgcctggtcaaaggcttctaccccagcgacatcgccgtggagtgggagagcaatgggcagccggagaacaactacaagaccacacctcccatgctggactccgacggctccttcttcctctacagcaagctcaccgtggacaagagcaggtggcagcaggggaacgtcttctcatgctccgtgatgcatgaggctctgcacaaccactacacgcagaagagcctctccctgtctccgggtaaa

SEQ ID NO: 229 - protein, 213 aa, Artificial Sequence
  Synthetic Polypeptide
  MISC_FEATURE: Humanized Antibody Sequence
DIQLTQSPSFLSASVGDRVTITCRASSSISYIHWYQQKPGKAPKLLIYATSNLASGVPSRFSGSGSGTEFTLTISSLQPEDFATYYCQQWSSDPLTFGGGTKVEIKRTVAAPSVFIFPPSDEQLKSGTASVVCLLNNFYPREAKVQWKVDNALQSGNSQESVTEQDSKDSTYSLSSTLTLSKADYEKHKVYACEVTHQGLSSPVTKSFNRGEC

SEQ ID NO: 230 - DNA, 639 bp, Artificial Sequence
  Synthetic Polynucleotide
  misc_feature: Humanized Antibody Sequence
gacatccagttgacccagtctccatccttcctgtctgcatctgtaggagacagagtcaccatcacttgcagggccagctcaagtataagttacatacactggtatcagcaaaaaccagggaaagcccctaagctcctgatctatgccacatccaacctggcttctggggtcccatcaaggttcagcggcagtggatctgggacagaattcactctcacaatcagcagcctgcagcctgaagattttgcaacttattactgtcagcagtggagtagtgacccactcacgttcggcggagggaccaaggtggagatcaaacgtacggtggctgcaccatctgtcttcatcttcccgccatctgatgagcagttgaaatctggaactgcctctgttgtgtgcctgctgaataacttctatcccagagaggccaaagtacagtggaaggtggataacgccctccaatcgggtaactcccaggagagtgtcacagagcaggacagcaaggacagcacctacagcctcagcagcaccctgacgctgagcaaagcagactacgagaaacacaaagtctacgcctgcgaagtcacccatcagggcctgagctcgcccgtcacaaagagcttcaacaggggagagtgt

SEQ ID NO: 231 - protein, 235 aa, Artificial Sequence
  Synthetic Polypeptide
  MISC_FEATURE: Humanized Antibody Sequence
MDMRVPAQLLGLLLLWLPGARCDIQLTQSPSFLSASVGDRVTITCRASSSISYIHWYQQKPGKAPKLLIYATSNLASGVPSRFSGSGSGTEFTLTISSLQPEDFATYYCQQWSSDPLTFGGGTKVEIKRTVAAPSVFIFPPSDEQLKSGTASVVCLLNNFYPREAKVQWKVDNALQSGNSQESVTEQDSKDSTYSLSSTLTLSKADYEKHKVYACEVTHQGLSSPVTKSFNRGEC

SEQ ID NO: 232 - DNA, 705 bp, Artificial Sequence
  Synthetic Polynucleotide
  misc_feature: Humanized Antibody Sequence
atggacatgagggtccccgctcagctcctggggctcctgctgctctggctcccaggtgccagatgtgacatccagttgacccagtctccatccttcctgtctgcatctgtaggagacagagtcaccatcacttgcagggccagctcaagtataagttacatacactggtatcagcaaaaaccagggaaagcccctaagctcctgatctatgccacatccaacctggcttctggggtcccatcaaggttcagcggcagtggatctgggacagaattcactctcacaatcagcagcctgcagcctgaagattttgcaacttattactgtcagcagtggagtagtgacccactcacgttcggcggagggaccaaggtggagatcaaacgtacggtggctgcaccatctgtcttcatcttcccgccatctgatgagcagttgaaatctggaactgcctctgttgtgtgcctgctgaataacttctatcccagagaggccaaagtacagtggaaggtggataacgccctccaatcgggtaactcccaggagagtgtcacagagcaggacagcaaggacagcacctacagcctcagcagcaccctgacgctgagcaaagcagactacgagaaacacaaagtctacgcctgcgaagtcacccatcagggcctgagctcgcccgtcacaaagagcttcaacaggggagagtgt

SEQ ID NO: 233 - protein, 447 aa, Artificial Sequence
  Synthetic Polypeptide
  MISC_FEATURE: Humanized Antibody Sequence
EVQLVQSGAEVKKPGASVKVSCKASGFDIKDYYIHWVRQAPGQGLEWIGRVDPDNGETEFAPKFPGKVTMTTDTSISTAYMELSRLRSDDTAVYYCAREDYDGTYTWFPYWGQGTLVTVSSASTKGPSVFPLAPCSRSTSESTAALGCLVKDYFPEPVTVSWNSGALTSGVHTFPAVLQSSGLYSLSSVVTVPSSNFGTQTYTCNVDHKPSNTKVDKTVERKCCVECPPCPAPPVAGPSVFLFPPKPKDTLMISRTPEVTCVVVDVSHEDPEVQFNWYVDGVEVHNAKTKPREEQFNSTFRVVSVLTVVHQDWLNGKEYKCKVSNKGLPAPIEKTISKTKGQPREPQVYTLPPSREEMTKNQVSLTCLVKGFYPSDIAVEWESNGQPENNYKTTPPMLDSDGSFFLYSKLTVDKSRWQQGNVFSCSVMHEALHNHYTQKSLSLSPGK

SEQ ID NO: 234 - DNA, 1341 bp, Artificial Sequence
  Synthetic Polynucleotide
  misc_feature: Humanized Antibody Sequence
gaggtgcagctggtgcagtctggggctgaggtgaagaagcctggggcctcagtgaaggtctcctgcaaggcttctggattcgacattaaggactactatatacactgggtgcgacaggcccctggacaagggcttgagtggatcggaagggttgatcctgacaatggtgagactgaatttgccccgaagttcccgggcaaggtcaccatgaccacagacacgtccatcagcacagcctacatggagctgagcaggctgagatctgacgacacggccgtgtattactgtgcgagagaagactacgatggtacctacacctggtttccttattggggccaagggactctggtcaccgtctctagtgcctccaccaagggcccatcggtcttccccctggcgccctgctccaggagcacctccgagagcacagcggccctgggctgcctggtcaaggactacttccccgaaccggtgacggtgtcgtggaactcaggcgctctgaccagcggcgtgcacaccttcccagctgtcctacagtcctcaggactctactccctcagcagcgtggtgaccgtgccctccagcaacttcggcacccagacctacacctgcaacgtagatcacaagcccagcaacaccaaggtggacaagacagttgagcgcaaatgttgtgtcgagtgcccaccgtgcccagcaccacctgtggcaggaccgtcagtcttcctcttccccccaaaacccaaggacaccctcatgatctcccggacccctgaggtcacgtgcgtggtggtggacgtgagccacgaagaccccgaggtccagttcaactggtacgtggacggcgtggaggtgcataatgccaagacaaagccacgggaggagcagttcaacagcacgttccgtgtggtcagcgtcctcaccgttgtgcaccaggactggctgaacggcaaggagtacaagtgcaaggtctccaacaaaggcctcccagcccccatcgagaaaaccatctccaaaaccaaagggcagccccgagaaccacaggtgtacaccctgcccccatcccgggaggagatgaccaagaaccaggtcagcctgacctgcctggtcaaaggcttctaccccagcgacatcgccgtggagtgggagagcaatgggcagccggagaacaactacaagaccacacctcccatgctggactccgacggctccttcttcctctacagcaagctcaccgtggacaagagcaggtggcagcaggggaacgtcttctcatgctccgtgatgcatgaggctctgcacaaccactacacgcagaagagcctctccctgtctccgggtaaa

SEQ ID NO: 235 - protein, 466 aa, Artificial Sequence
  Synthetic Polypeptide
  MISC_FEATURE: Humanized Antibody Sequence
MDWTWRILFLVAAATGAHSEVQLVQSGAEVKKPGASVKVSCKASGFDIKDYYIHWVRQAPGQGLEWIGRVDPDNGETEFAPKFPGKVTMTTDTSISTAYMELSRLRSDDTAVYYCAREDYDGTYTWFPYWGQGTLVTVSSASTKGPSVFPLAPCSRSTSESTAALGCLVKDYFPEPVTVSWNSGALTSGVHTFPAVLQSSGLYSLSSVVTVPSSNFGTQTYTCNVDHKPSNTKVDKTVERKCCVECPPCPAPPVAGPSVFLFPPKPKDTLMISRTPEVTCVVVDVSHEDPEVQFNWYVDGVEVHNAKTKPREEQFNSTFRVVSVLTVVHQDWLNGKEYKCKVSNKGLPAPIEKTISKTKGQPREPQVYTLPPSREEMTKNQVSLTCLVKGFYPSDIAVEWESNGQPENNYKTTPPMLDSDGSFFLYSKLTVDKSRWQQGNVFSCSVMHEALHNHYTQKSLSLSPGK

SEQ ID NO: 236 - DNA, 1398 bp, Artificial Sequence
  Synthetic Polynucleotide
  misc_feature: Humanized Antibody Sequence
atggactggacctggaggatcctcttcttggtggcagcagccacaggagcccactccgaggtgcagctggtgcagtctggggctgaggtgaagaagcctggggcctcagtgaaggtctcctgcaaggcttctggattcgacattaaggactactatatacactgggtgcgacaggcccctggacaagggcttgagtggatcggaagggttgatcctgacaatggtgagactgaatttgccccgaagttcccgggcaaggtcaccatgaccacagacacgtccatcagcacagcctacatggagctgagcaggctgagatctgacgacacggccgtgtattactgtgcgagagaagactacgatggtacctacacctggtttccttattggggccaagggactctggtcaccgtctctagtgcctccaccaagggcccatcggtcttccccctggcgccctgctccaggagcacctccgagagcacagcggccctgggctgcctggtcaaggactacttccccgaaccggtgacggtgtcgtggaactcaggcgctctgaccagcggcgtgcacaccttcccagctgtcctacagtcctcaggactctactccctcagcagcgtggtgaccgtgccctccagcaacttcggcacccagacctacacctgcaacgtagatcacaagcccagcaacaccaaggtggacaagacagttgagcgcaaatgttgtgtcgagtgcccaccgtgcccagcaccacctgtggcaggaccgtcagtcttcctcttccccccaaaacccaaggacaccctcatgatctcccggacccctgaggtcacgtgcgtggtggtggacgtgagccacgaagaccccgaggtccagttcaactggtacgtggacggcgtggaggtgcataatgccaagacaaagccacgggaggagcagttcaacagcacgttccgtgtggtcagcgtcctcaccgttgtgcaccaggactggctgaacggcaaggagtacaagtgcaaggtctccaacaaaggcctcccagcccccatcgagaaaaccatctccaaaaccaaagggcagccccgagaaccacaggtgtacaccctgcccccatcccgggaggagatgaccaagaaccaggtcagcctgacctgcctggtcaaaggcttctaccccagcgacatcgccgtggagtgggagagcaatgggcagccggagaacaactacaagaccacacctcccatgctggactccgacggctccttcttcctctacagcaagctcaccgtggacaagagcaggtggcagcaggggaacgtcttctcatgctccgtgatgcatgaggctctgcacaaccactacacgcagaagagcctctccctgtctccgggtaaa

SEQ ID NO: 237 - protein, 7 aa, Mus musculus
GTSNLAS

SEQ ID NO: 238 - protein, 8 aa, Mus musculus
QQWTTTYT

SEQ ID NO: 239 - protein, 11 aa, Mus musculus
RASQDISSYLN

SEQ ID NO: 240 - protein, 7 aa, Mus musculus
STSRLNS

SEQ ID NO: 241 - protein, 8 aa, Mus musculus
QQDIKHPT

SEQ ID NO: 242 - protein, 11 aa, Mus musculus
KASQDVFTAVA

SEQ ID NO: 243 - protein, 7 aa, Mus musculus
WASTRHT

SEQ ID NO: 244 - protein, 9 aa, Mus musculus
QQYSSYPLT

SEQ ID NO: 245 - protein, 5 aa, Mus musculus
DYNMH

SEQ ID NO: 246 - protein, 17 aa, Mus musculus
EINPNSGGAGYNQKFKG

SEQ ID NO: 247 - protein, 14 aa, Mus musculus
LGYDDIYDDWYFDV

SEQ ID NO: 248 - protein, 5 aa, Mus musculus
DYNMH

SEQ ID NO: 249 - protein, 17 aa, Mus musculus
EINPNSGGSGYNQKFKG

SEQ ID NO: 250 - protein, 14 aa, Mus musculus
LVYDGSYEDWYFDV

SEQ ID NO: 251 - protein, 5 aa, Mus musculus
DYNMH

SEQ ID NO: 252 - protein, 17 aa, Mus musculus
EINPNSGGAGYNQQFKG

SEQ ID NO: 253 - protein, 14 aa, Mus musculus
LGYVGNYEDWYFDV

SEQ ID NO: 254 - protein, 5 aa, Mus musculus
DYNMH

SEQ ID NO: 255 - protein, 17 aa, Mus musculus
EINPNSGGAGYNQKFKG

SEQ ID NO: 256 - protein, 14 aa, Mus musculus
LGYDDIYDDWYFDV

SEQ ID NO: 257 - protein, 5 aa, Mus musculus
DYNMH

SEQ ID NO: 258 - protein, 17 aa, Mus musculus
EINPNSGGAGYNQKFKG

SEQ ID NO: 259 - protein, 14 aa, Mus musculus
LGYDDIYDDWYFDV

SEQ ID NO: 260 - protein, 5 aa, Mus musculus
DYNMH

SEQ ID NO: 261 - protein, 17 aa, Mus musculus
EINPNSGGAGYNQKFKG

SEQ ID NO: 262 - protein, 14 aa, Mus musculus
LGYDDIYDDWYFDV

SEQ ID NO: 263 - protein, 5 aa, Mus musculus
DYNMH

SEQ ID NO: 264 - protein, 17 aa, Mus musculus
EINPNSGGSGYNQKFKG

SEQ ID NO: 265 - protein, 14 aa, Mus musculus
LGYYGNYEDWYFDV

SEQ ID NO: 266 - protein, 5 aa, Mus musculus
DYYIH

SEQ ID NO: 267 - protein, 17 aa, Mus musculus
RIDPDNGESTYVPKFQG

SEQ ID NO: 268 - protein, 13 aa, Mus musculus
EGLDYGDYYAVDY

SEQ ID NO: 269 - protein, 5 aa, Mus musculus
DYIMH

SEQ ID NO: 270 - protein, 17 aa, Mus musculus
YINPYNDDTEYNEKFKG

SEQ ID NO: 271 - protein, 11 aa, Mus musculus
SIYYYDAPFAY

SEQ ID NO: 272 - protein, 5 aa, Mus musculus
DYYMH

SEQ ID NO: 273 - protein, 17 aa, Mus musculus
RIDPENGDIIYDPKFQG

SEQ ID NO: 274 - protein, 10 aa, Mus musculus
DAGDPAWFTY

SEQ ID NO: 275 - protein, 10 aa, Mus musculus
RASSSVYYMH

SEQ ID NO: 276 - protein, 7 aa, Mus musculus
ATSNLAS

SEQ ID NO: 277 - protein, 9 aa, Mus musculus
QQWSSDPLT

SEQ ID NO: 278 - protein, 12 aa, Mus musculus
SVSSTISSNHLH

SEQ ID NO: 279 - protein, 7 aa, Mus musculus
GTSNLAS

SEQ ID NO: 280 - protein, 9 aa, Mus musculus
QQWSSYPLT

SEQ ID NO: 281 - protein, 10 aa, Mus musculus
RASSSISYIH

SEQ ID NO: 282 - protein, 7 aa, Mus musculus
ATSNLAS

SEQ ID NO: 283 - protein, 9 aa, Mus musculus
QQWSSDPLT

SEQ ID NO: 284 - protein, 12 aa, Mus musculus
RASSSVTSSYLN

SEQ ID NO: 285 - protein, 7 aa, Mus musculus
STSNLAS

SEQ ID NO: 286 - protein, 9 aa, Mus musculus
QQYDFFPST

SEQ ID NO: 287 - protein, 5 aa, Mus musculus
DYFIH

SEQ ID NO: 288 - protein, 17 aa, Mus musculus
RLDPEDGESDYAPKFQD

SEQ ID NO: 289 - protein, 12 aa, Mus musculus
EDYDGTYTFFPY

SEQ ID NO: 290 - protein, 5 aa, Mus musculus
DFYLH

SEQ ID NO: 291 - protein, 17 aa, Mus musculus
RIDPENGDTLYDPKFQD

SEQ ID NO: 292 - protein, 16 aa, Mus musculus
EADYFHDGTSYWYFDV

SEQ ID NO: 293 - protein, 5 aa, Mus musculus
DYYIH

SEQ ID NO: 294 - protein, 17 aa, Mus musculus
RVDPDNGETEFAPKFPG

SEQ ID NO: 295 - protein, 12 aa, Mus musculus
EDYDGTYTWFPY

SEQ ID NO: 296 - protein, 5 aa, Mus musculus
DYYMN

SEQ ID NO: 297 - protein, 17 aa, Mus musculus
DINPYNDDTTYNHKFKG

SEQ ID NO: 298 - protein, 11 aa, Mus musculus
ETAVITTNAMD

SEQ ID NO: 299 - protein, 130 aa, Mus musculus
MDFQVQIFSFMLISVTVILSSGEIVLTQSPALMAASPGEKVTITCSVSSSISSSNLHWSQQKSGTSPKLWIYGTSNLASGVPVRFSGSGSGTSYSLTISSMEAEDAATYYCQQWTTTYTFGSGTKLELKR

SEQ ID NO: 300 - DNA, 390 bp, Mus musculus
atggattttcaggtgcagattttcagcttcatgctaatcagtgtcacagtcatattgtccagtggagaaattgtgctcacccagtctccagcactcatggctgcatctccaggggagaaggtcaccatcacctgcagtgtcagctcgagtataagttccagcaacttacactggtcccagcagaagtcaggaacctcccccaaactctggatttatggcacatccaaccttgcttctggagtccctgttcgcttcagtggcagtggatctgggacctcttattctctcacaatcagcagcatggaggctgaagatgctgccacttattactgtcaacagtggactactacgtatacgttcggatcggggaccaagctggagctgaaacgt

SEQ ID NO: 301 - protein, 141 aa, Mus musculus
MGWNWIIFFLMAVVTGVNSEVQLRQSGADLVKPGASVKLSCTASGFNIKDYYIHWVKQRPEQGLEWIGRIDPDNGESTYVPKFQGKATITADTSSNTAYLQLRSLTSEDTAIYYCGREGLDYGDYYAVDYWGQGTSVTVSS

SEQ ID NO: 302 - DNA, 423 bp, Mus musculus
atgggatggaactggatcatcttcttcctgatggcagtggttacaggggtcaattcagaggtgcagttgcggcagtctggggcagaccttgtgaagccaggggcctcagtcaagttgtcctgcacagcttctggcttcaacattaaagactactatatacactgggtgaagcagaggcctgaacagggcctggagtggattggaaggattgatcctgataatggtgaaagtacatatgtcccgaagttccagggcaaggccactataacagcagacacatcatccaacacagcctacctacaactcagaagcctgacatctgaggacactgccatctattattgtgggagagaggggctcgactatggtgactactatgctgtggactactggggtcaaggaacctcggtcacagtctcgagc

SEQ ID NO: 303 - protein, 130 aa, Artificial Sequence
  Synthetic Polypeptide
  MISC_FEATURE: Humanized Antibody Sequence
MDMRVPAQLLGLLLLWLPGARCDIQLTQSPSFLSASVGDRVTITCSVSSSISSSNLHWYQQKPGKAPKLLIYGTSNLASGVPSRFSGSGSGTEFTLTISSLQPEDFATYYCQQWTTTYTFGQGTKLEIKR

SEQ ID NO: 304 - DNA, 390 bp, Artificial Sequence
  Synthetic Polynucleotide
  misc_feature: Humanized Antibody Sequence
atggatatgcgcgtgccggcgcagctgctgggcctgctgctgctgtggctgccgggcgcgcgctgcgatattcagctgacccagagcccgagctttctgagcgcgagcgtgggcgatcgcgtgaccattacctgcagcgtgagcagcagcattagcagcagcaacctgcattggtatcagcagaaaccgggcaaagcgccgaaactgctgatttatggcaccagcaacctggcgagcggcgtgccgagccgctttagcggcagcggcagcggcaccgaatttaccctgaccattagcagcctgcagccggaagattttgcgacctattattgccagcagtggaccaccacctatacctttggccagggcaccaaactggaaattaaacgt

SEQ ID NO: 305 - protein, 141 aa, Artificial Sequence
  Synthetic Polypeptide
  MISC_FEATURE: Humanized Antibody Sequence
MDWTWSILFLVAAPTGAHSEVQLVQSGAEVKKPGASVKVSCKASGFNIKDYYIHWVRQAPGQGLEWMGRIDPDNGESTYVPKFQGRVTMTTDTSTSTAYMELRSLRSDDTAVYYCAREGLDYGDYYAVDYWGQGTLVTVSS

SEQ ID NO: 306 - DNA, 423 bp, Artificial Sequence
  Synthetic Polynucleotide
  misc_feature: Humanized Antibody Sequence
atggattggacctggagcattctgtttctggtggcggcgccgaccggcgcgcatagcgaagtgcagctggtgcagagcggcgcggaagtgaaaaaaccgggcgcgagcgtgaaagtgagctgcaaagcgagcggctttaacattaaagattattatattcattgggtgcgccaggcgccgggccagggcctggaatggatgggccgcattgatccggataacggcgaaagcacctatgtgccgaaatttcagggccgcgtgaccatgaccaccgataccagcaccagcaccgcgtatatggaactgcgcagcctgcgcagcgatgataccgcggtgtattattgcgcgcgcgaaggcctggattatggcgattattatgcggtggattattggggccagggcaccctggtgaccgtctcgagc

SEQ ID NO: 307 - protein, 127 aa, Artificial Sequence
  Synthetic Polypeptide
  MISC_FEATURE: Humanized Antibody Sequence
MMSSAQFLGLLLLCFQGTRCDIQMTQTTSSLSASLGDRVNISCRASQDISSYLNWYQQKPDGTVKLLIYSTSRLNSGVPSRFSGSGSGTDYSLTISNLAQEDIATYFCQQDIKHPTFGGGTKLELKR

SEQ ID NO: 308 - DNA, 381 bp, Mus musculus
atgatgtcctctgctcagttccttggtctcctgttgctctgttttcaaggtaccagatgtgatatccagatgacacagactacatcctccctgtctgcctctctgggagacagagtcaacatcagctgcagggcaagtcaggacattagcagttatttaaactggtatcagcagaaaccagatggaactgttaaactcctgatctactccacatcaagattaaactcaggagtcccatcaaggttcagtggcagtgggtctgggacagattattctctcactattagcaacctggcacaagaagatattgccacttacttttgccaacaggatattaagcatccgacgttcggtggaggcaccaagttggagctgaaacgt

SEQ ID NO: 309 - protein, 139 aa, Mus musculus
MEWIWIFLFLLSGTAGVHSEVQLQQSGPELVKPGASVKMSCKASGFTFTDYIMHWVKQKPGQGLEWIGYINPYNDDTEYNEKFKGKATLTSDKSSSTAYMDLSSLTSEGSAVYYCARSIYYYDAPFAYWGQGTLVTVSS

SEQ ID NO: 310 - DNA, 417 bp, Mus musculus
atggaatggatctggatatttctcttcctcctgtcaggaactgcaggtgtccactctgaggtccagctgcagcagtctggacctgagctggtaaagcctggggcttcagtgaagatgtcctgcaaggcttctgggttcacattcactgactacattatgcactgggtgaagcagaagcctgggcagggccttgagtggattggatatattaatccttacaatgatgatactgaatacaatgagaagttcaaaggcaaggccacactgacttcagacaaatcctccagcacagcctacatggatctcagcagtctgacctctgagggctctgcggtctattactgtgcaagatcgatttattactacgatgccccgtttgcttactggggccaagggactctggtcacagtctcgagc

SEQ ID NO: 311 - protein, 127 aa, Artificial Sequence
  Synthetic Polypeptide
  MISC_FEATURE: Humanized Antibody Sequence
MMSSAQFLGLLLLCFQGTRCDIQMTQSPSSLSASVGDRVTITCRASQDISSYLNWYQQKPGKAPKLLIYSTSRLNSGVPSRFSGSGSGTDFTLTISSLQPEDFATYYCQQDIKHPTFGQGTKVEIKR

SEQ ID NO: 312 - DNA, 381 bp, Artificial Sequence
  Synthetic Polynucleotide
  misc_feature: Humanized Antibody Sequence
atgatgtcctctgctcagttccttggtctcctgttgctctgttttcaaggtaccagatgtgatatccagatgacccagtctccatcctccctgtctgcatctgtaggtgaccgtgtcaccatcacttgccgcgcaagtcaggatattagcagctatttaaattggtatcagcagaaaccagggaaagcccctaagctcctgatctattctacttcccgtttgaatagtggggtcccatcacgcttcagtggcagtggctctgggacagatttcactctcaccatcagcagtctgcaacctgaagattttgcaacttactactgtcaacaggatattaaacaccctacgttcggtcaaggcaccaaggtggagatcaaacgt

SEQ ID NO: 313 - protein, 139 aa, Artificial Sequence
  Synthetic Polypeptide
  MISC_FEATURE: Humanized Antibody Sequence
MEWIWIFLFLLSGTAGVHSEVQLVQSGAEVKKPGSSVKVSCKASGFTFTDYIMHWVRQAPGQGLEWMGYINPYNDDTEYNEKFKGRVTITADKSTSTAYMELSSLRSEDTAVYYCARSIYYYDAPFAYWGQGTLVTVSS

SEQ ID NO: 314 - protein, 107 aa, Mus musculus
DIQMTQTTSSLSASLGDRVNISCRASQDISSYLNWYQQKPDGTVKLLIYSTSRLNSGVPSRFSGSGSGTDYSLTISNLAQEDIATYFCQQDIKHPTFGGGTKLELKR

SEQ ID NO: 315 - protein, 128 aa, Mus musculus
MKSQTQVFVYMLLWLSGVEGDIVMTQSHKFMSTSVGDRVTITCKASQDVFTAVAWYQQKPGQSPKLLIYWASTRHTGVPDRFTGSGSGTDFTLTISNVQSEDLADYFCQQYSSYPLTFGAGTKLELKR

SEQ ID NO: 316 - DNA, 381 bp, Mus musculus
atgaagtcacagacccaggtctttgtatacatgttgctgtggttgtctggtgttgaaggagacattgtgatgacccagtctcacaaattcatgtccacgtcagtaggagacagggtcaccatcacctgcaaggccagtcaggatgtctttactgctgtagcctggtatcaacagaaaccaggacaatctcctaaactactgatttactgggcatccacccggcacactggagtccctgatcgcttcacaggcagtggatctgggacagatttcactctcaccattagcaatgtgcagtctgaagacttggcagattatttctgtcaacaatatagcagctatcctctcacgttcggtgctgggaccaagttggagctgaaa

SEQ ID NO: 317 - protein, 138 aa, Mus musculus
MGWNWIIFFLMAVVTGVNSEVQLQQSGAELVRPGALVKLSCKASGFNIKDYYMHWVKQRPEQGLEWIGRIDPENGDIIYDPKFQGKASITTDTSSNTAYLQLSSLTSEDTAVYYCAYDAGDPAWFTYWGQGTLVTVSS

SEQ ID NO: 318 - DNA, 411 bp, Mus musculus
atgggatggaactggatcatcttcttcctgatggcagtggttacaggggtcaattcagaggttcagctgcagcagtctggggctgagcttgtgaggccaggggccttagtcaagttgtcctgcaaagcttctggcttcaatattaaagactactatatgcactgggtgaagcagaggcctgaacagggcctggagtggattggaaggattgatcctgagaatggtgatattatatatgacccgaagttccagggcaaggccagtataacaacagacacatcctccaacacagcctacctgcagctcagcagcctgacgtctgaggacactgccgtctattactgtgcttacgatgctggtgaccccgcctggtttacttactggggccaagggactctggtcaccgtctcg

SEQ ID NO: 319 - protein, 130 aa, Mus musculus
MDMRVPAQLLGLLLLWLRGARCDIQMTQSPSSLSASVGDRVTITCKASQDVFTAVAWYQQKPGKAPKLLIYWASTRHTGVPSRFSGSGSGTDFTLTISSLQPEDFATYYCQQYSSYPLTFGGGTKVEIKR

SEQ ID NO: 320 - DNA, 390 bp, Mus musculus
atggatatgcgcgtgccggcgcagctgctgggcctgctgctgctgtggctgcgcggcgcgcgctgcgatatccagatgacccagagcccgagcagcctgagcgcgagcgtgggcgatcgcgtgaccattacctgcaaagcgagccaggatgtgtttaccgcggtggcgtggtatcagcagaaaccgggcaaagcgccgaaactgctgatttattgggcgagcacccgccataccggcgtgccgagtcgctttagcggcagcggcagcggcaccgattttaccctgaccattagcagcctgcagccggaagattttgcgacctattattgccagcagtatagcagctatccgctgacctttggcggcggcaccaaagtggaaattaaacgt

SEQ ID NO: 321 - protein, 138 aa, Artificial Sequence
  Synthetic Polypeptide
  MISC_FEATURE: Humanized Antibody Sequence
MDWTWSILFLVAAPTGAHSEVQLVQSGAEVKKPGASVKVSCKASGFNIKDYYMHWVRQAPGQGLEWIGRIDPENGDIIYDPKFQGRVTMTTDTSTSTAYMELRSLRSDDTAVYYCAYDAGDPAWFTYWGQGTLVTVSS

SEQ ID NO: 322 - DNA, 414 bp, Artificial Sequence
  Synthetic Polynucleotide
  misc_feature: Humanized Antibody Sequence
atggattggacctggagcattctgtttctggtggcggcgccgaccggcgcgcatagcgaagtgcagctggtgcagagcggcgcggaagtgaaaaaaccgggcgcgagcgtgaaagtgagctgcaaagcgagcggctttaacattaaagattattatatgcattgggtgcgccaggcgccgggccagggcctggaatggatcggccgcattgatccggaaaacggcgatattatttatgatccgaaatttcagggccgcgtgaccatgaccaccgataccagcaccagcaccgcgtatatggaactgcgcagcctgcgcagcgatgataccgcggtgtattattgcgcgtatgatgcgggcgatccggcgtggtttacctattggggccagggcaccctggtgaccgtctcgagc

SEQ ID NO: 323 - protein, 106 aa, Mus musculus
TDAAPTVSIFPPSSEQLTSGGASVVCFLNNFYPKDINVKWKIDGSERQNGVLNSWTDQDSKDSTYSMSSTLTLTKDEYERHNSYTCEATHKTSTSPIVKSFNRNEC

SEQ ID NO: 324 - protein, 320 aa, Mus musculus
AKTTPPSVYPLAPGSAAQTNSMVTLGCLVKGYFPEPVTVTWNSGSLSSGVHTFPAVLQSDLYTLSSSVTVPSSTWPSETVTCNVAHPASSTKVDKKIVPRDCGCKPCICTVPEVSSVFIFPPKPKDVLTITLTPKVTCVVVDISKDDPEVQFSWFVDDVEVHTAQTQPREEQFNSTFRSVSELPIMHQDWLNGKEFKCRVNSAAFPAPIEKTISKTKGRPKAPQVYTIPPPKEQMAKDKVSLTCMITDFFPEDITVEWQWNGQPAENYKNTQPIMDTDGSYFVYSKLNVQKSNWEAGNTFTCSVLHEGLHNHHTEKSLSH

SEQ ID NO: 325 - protein, 106 aa, Homo sapiens
TVAAPSVFIFPPSDEQLKSGTASVVCLLNNFYPREAKVQWKVDNALQSGNSQESVTEQDSKDSTYSLSSTLTLSKADYEKHKVYACEVTHQGLSSPVTKSFNRGEC

SEQ ID NO: 326 - protein, 327 aa, Homo sapiens
ASTKGPSVFPLAPCSRSTSESTAALGCLVKDYFPEPVTVSWNSGALTSGVHTFPAVLQSSGLYSLSSVVTVPSSSLGTKTYTCNVDHKPSNTKVDKRVESKYGPPCPPCPAPEFLGGPSVFLFPPKPKDTLMISRTPEVTCVVVDVSQEDPEVQFNWYVDGVEVHNAKTKPREEQFNSTYRVVSVLTVLHQDWLNGKEYKCKVSNKGLPSSIEKTISKAKGQPREPQVYTLPPSQEEMTKNQVSLTCLVKGFYPSDIAVEWESNGQPENNYKTTPPVLDSDGSFFLYSRLTVDKSRWQEGNVFSCSVMHEALHNHYTQKSLSLSLGK

SEQ ID NO: 327 - protein, 120 aa, Mus musculus
EVQLQQSGPELVKPGASVKMSCKASGFTFTDYIMHWVKQKPGQGLEWIGYINPYNDDTEYNEKFKGKATLTSDKSSSTAYMDLSSLTSEGSAVYYCARSIYYYDAPFAYWGQGTLVTVSS

SEQ ID NO: 328 - protein, 120 aa, Mus musculus; identical to SEQ ID NO: 327

SEQ ID NO: 329 - protein, 120 aa, Mus musculus
EVQLVQSGAEVKKPGSSVKVSCKASGFTFTDYIMHWVRQAPGQGLEWMGYINPYNDDTEYNEKFKGRVTITADKSTSTAYMELSSLRSEDTAVYYCARSIYYYDAPFAYWGQGTLVTVSS

SEQ ID NO: 330 - protein, 226 aa, Mus musculus
EVQLQQSGPELVKPGASVKMSCKASGFTFTDYIMHWVKQKPGQGLEWIGYINPYNDDTEYNEKFKGKATLTSDKSSSTAYMDLSSLTSEGSAVYYCARSIYYYDAPFAYWGQGTLVTVSSTVAAPSVFIFPPSDEQLKSGTASVVCLLNNFYPREAKVQWKVDNALQSGNSQESVTEQDSKDSTYSLSSTLTLSKADYEKHKVYACEVTHQGLSSPVTKSFNRGEC

SEQ ID NO: 331 - protein, 447 aa, Mus musculus
EVQLVQSGAEVKKPGSSVKVSCKASGFTFTDYIMHWVRQAPGQGLEWMGYINPYNDDTEYNEKFKGRVTITADKSTSTAYMELSSLRSEDTAVYYCARSIYYYDAPFAYWGQGTLVTVSSASTKGPSVFPLAPCSRSTSESTAALGCLVKDYFPEPVTVSWNSGALTSGVHTFPAVLQSSGLYSLSSVVTVPSSSLGTKTYTCNVDHKPSNTKVDKRVESKYGPPCPPCPAPEFLGGPSVFLFPPKPKDTLMISRTPEVTCVVVDVSQEDPEVQFNWYVDGVEVHNAKTKPREEQFNSTYRVVSVLTVLHQDWLNGKEYKCKVSNKGLPSSIEKTISKAKGQPREPQVYTLPPSQEEMTKNQVSLTCLVKGFYPSDIAVEWESNGQPENNYKTTPPVLDSDGSFFLYSRLTVDKSRWQEGNVFSCSVMHEALHNHYTQKSLSLSLGK

SEQ ID NO: 332 - protein, 107 aa, Mus musculus
DIQMTQITSSLSASLGDRVSISCRASQDISNYLNWYQQKPDGTFKLLIFYTSRLLSGVPSRFSGSGSGTDYSLTIYNLEQEDFATYFCQQGDTLPYTFGGGTKLEIK

SEQ ID NO: 333 - protein, 324 aa, Mus musculus
AKTTPPSVYPLAPGSAAQTNSMVTLGCLVKGYFPEPVTVTWNSGSLSSGVHTFPAVLQSDLYTLSSSVTVPSSTWPSETVTCNVAHPASSTKVDKKIVPRDCGCKPCICTVPEVSSVFIFPPKPKDVLTITLTPKVTCVVVDISKDDPEVQFSWFVDDVEVHTAQTQPREEQFNSTFRSVSELPIMHQDWLNGKEFKCRVNSAAFPAPIEKTISKTKGRPKAPQVYTIPPPKEQMAKDKVSLTCMITDFFPEDITVEWQWNGQPAENYKNTQPIMDTDGSYFIYSKLNVQKSNWEAGNTFTCSVLHEGLHNHHTEKSLSHSPGK

SEQ ID NO: 334 - protein, 213 aa, Mus musculus
DIQMTQTTSSLSASLGDRVNISCRASQDISSYLNWYQQKPDGTVKLLIYSTSRLNSGVPSRFSGSGSGTDYSLTISNLAQEDIATYFCQQDIKHPTFGGGTKLELKRTDAAPTVSIFPPSSEQLTSGGASVVCFLNNFYPKDINVKWKIDGSERQNGVLNSWTDQDSKDSTYSMSSTLTLTKDEYERHNSYTCEATHKTSTSPIVKSFNRNEC

SEQ ID NO: 335 - protein, 444 aa, Mus musculus
EVQLQQSGPELVKPGASVKMSCKASGFTFTDYIMHWVKQKPGQGLEWIGYINPYNDDTEYNEKFKGKATLTSDKSSSTAYMDLSSLTSEGSAVYYCARSIYYYDAPFAYWGQGTLVTVSSAKTTPPSVYPLAPGSAAQTNSMVTLGCLVKGYFPEPVTVTWNSGSLSSGVHTFPAVLQSDLYTLSSSVTVPSSTWPSETVTCNVAHPASSTKVDKKIVPRDCGCKPCICTVPEVSSVFIFPPKPKDVLTITLTPKVTCVVVDISKDDPEVQFSWFVDDVEVHTAQTQPREEQFNSTFRSVSELPIMHQDWLNGKEFKCRVNSAAFPAPIEKTISKTKGRPKAPQVYTIPPPKEQMAKDKVSLTCMITDFFPEDITVEWQWNGQPAENYKNTQPIMDTDGSYFVYSKLNVQKSNWEAGNTFTCSVLHEGLHNHHTEKSLSHSPGK

SEQ ID NO: 336 - protein, 108 aa, Mus musculus
DIQMTQSPSSLSASVGDRVTITCKASQDVFTAVAWYQQKPGKAPKLLIYWASTRHTGVPSRFSGSGSGTDFTLTISSLQPEDFATYYCQQYSSYPLTFGGGTKVEIKR

SEQ ID NO: 337 - DNA, 324 bp, Mus musculus
gatatccagatgacccagagcccgagcagcctgagcgcgagcgtgggcgatcgcgtgaccattacctgcaaagcgagccaggatgtgtttaccgcggtggcgtggtatcagcagaaaccgggcaaagcgccgaaactgctgatttattgggcgagcacccgccataccggcgtgccgagtcgctttagcggcagcggcagcggcaccgattttaccctgaccattagcagcctgcagccggaagattttgcgacctattattgccagcagtatagcagctatccgctgacctttggcggcggcaccaaagtggaaattaaacgt

SEQ ID NO: 338 - protein, 119 aa, Mus musculus
EVQLVQSGAEVKKPGASVKVSCKASGFNIKDYYMHWVRQAPGQGLEWIGRIDPENGDIIYDPKFQGRVTMTTDTSTSTAYMELRSLRSDDTAVYYCAYDAGDPAWFTYWGQGTLVTVSS

SEQ ID NO: 339 - DNA, 357 bp, Mus musculus
gaagtgcagctggtgcagagcggcgcggaagtgaaaaaaccgggcgcgagcgtgaaagtgagctgcaaagcgagcggctttaacattaaagattattatatgcattgggtgcgccaggcgccgggccagggcctggaatggatcggccgcattgatccggaaaacggcgatattatttatgatccgaaatttcagggccgcgtgaccatgaccaccgataccagcaccagcaccgcgtatatggaactgcgcagcctgcgcagcgatgataccgcggtgtattattgcgcgtatgatgcgggcgatccggcgtggtttacctattggggccagggcaccctggtgaccgtctcgagc

SEQ ID NO: 340 - DNA, 1395 bp, Mus musculus
atggactggacctggaggatcctcttcttggtggcagcagccacaggagcccactccgaggtgcagctggtgcagtctggggctgaggtgaagaagcctgggtcctcggtgaaggtctcctgcaaggcttctggttttaccttcaccgactatattatgcactgggtgcgtcaggcccctggtcaagggcttgagtggatgggctatatcaacccttataatgatgacaccgaatacaacgagaagttcaagggccgtgtcacgattaccgcggacaaatccacgagcacagcctacatggagctgagcagcctgcgctctgaggacacggccgtgtattactgtgcgcgttcgatttattactacgatgccccgtttgcttactggggccaagggactctggtcaccgtctctagtgcctccaccaagggcccatcggtcttccccctggcgccctgctccaggagcacctccgagagcacagcggccctgggctgcctggtcaaggactacttccccgaaccggtgacggtgtcgtggaactcaggcgctctgaccagcggcgtgcacaccttcccagctgtcctacagtcctcaggactctactccctcagcagcgtggtgaccgtgccctccagcaacttcggcacccagacctacacctgcaacgtagatcacaagcccagcaacaccaaggtggacaagacagttgagcgcaaatgttgtgtcgagtgcccaccgtgcccagcaccacctgtggcaggaccgtcagtcttcctcttccccccaaaacccaaggacaccctcatgatctcccggacccctgaggtcacgtgcgtggtggtggacgtgagccacgaagaccccgaggtccagttcaactggtacgtggacggcgtggaggtgcataatgccaagacaaagccacgggaggagcagttcaacagcacgttccgtgtggtcagcgtcctcaccgttgtgcaccaggactggctgaacggcaaggagtacaagtgcaaggtctccaacaaaggcctcccagcccccatcgagaaaaccatctccaaaaccaaagggcagccccgagaaccacaggtgtacaccctgcccccatcccgggaggagatgaccaagaaccaggtcagcctgacctgcctggtcaaaggcttctaccccagcgacatcgccgtggagtgggagagcaatgggcagccggagaacaactacaagaccacacctcccatgctggactccgacggctccttcttcctctacagcaagctcaccgtggacaagagcaggtggcagcaggggaacgtcttctcatgctccgtgatgcatgaggctctgcacaaccactacacgcagaagagcctctccctgtctccgggtaaa

SEQ ID NO: 341 - protein, 213 aa, Mus musculus
DIQMTQSPSSLSASVGDRVTITCRASQDISSYLNWYQQKPGKAPKLLIYSTSRLNSGVPSRFSGSGSGTDFTLTISSLQPEDFATYYCQQDIKHPTFGQGTKVEIKRTVAAPSVFIFPPSDEQLKSGTASVVCLLNNFYPREAKVQWKVDNALQSGNSQESVTEQDSKDSTYSLSSTLTLSKADYEKHKVYACEVTHQGLSSPVTKSFNRGEC

SEQ ID NO: 342 - DNA, 639 bp, Mus musculus
gacatccagatgacccagtctccatcctccctgtctgcatctgtaggtgaccgtgtcaccatcacttgccgcgcaagtcaggatattagcagctatttaaattggtatcagcagaaaccagggaaagcccctaagctcctgatctattctacttcccgtttgaatagtggggtcccatcacgcttcagtggcagtggctctgggacagatttcactctcaccatcagcagtctgcaacctgaagattttgcaacttactactgtcaacaggatattaaacaccctacgttcggtcaaggcaccaaggtggagatcaaacgtacggtggctgcaccatctgtcttcatcttcccgccatctgatgagcagttgaaatctggaactgcctctgttgtgtgcctgctgaataacttctatcccagagaggccaaagtacagtggaaggtggataacgccctccaatcgggtaactcccaggagagtgtcacagagcaggacagcaaggacagcacctacagcctcagcagcaccctgacgctgagcaaagcagactacgagaaacacaaagtctacgcctgcgaagtcacccatcagggcctgagctcgcccgtcacaaagagcttcaacaggggagagtgt

SEQ ID NO: 343 - protein, 235 aa, Mus musculus
MDMRVPAQLLGLLLLWLRGARCDIQMTQSPSSLSASVGDRVTITCRASQDISSYLNWYQQKPGKAPKLLIYSTSRLNSGVPSRFSGSGSGTDFTLTISSLQPEDFATYYCQQDIKHPTFGQGTKVEIKRTVAAPSVFIFPPSDEQLKSGTASVVCLLNNFYPREAKVQWKVDNALQSGNSQESVTEQDSKDSTYSLSSTLTLSKADYEKHKVYACEVTHQGLSSPVTKSFNRGEC

SEQ ID NO: 344 - DNA, 705 bp, Mus musculus
atggacatgagggtgcccgctcagctcctggggctcctgctgctgtggctgagaggtgccagatgtgacatccagatgacccagtctccatcctccctgtctgcatctgtaggtgaccgtgtcaccatcacttgccgcgcaagtcaggatattagcagctatttaaattggtatcagcagaaaccagggaaagcccctaagctcctgatctattctacttcccgtttgaatagtggggtcccatcacgcttcagtggcagtggctctgggacagatttcactctcaccatcagcagtctgcaacctgaagattttgcaacttactactgtcaacaggatattaaacaccctacgttcggtcaaggcaccaaggtggagatcaaacgtacggtggctgcaccatctgtcttcatcttcccgccatctgatgagcagttgaaatctggaactgcctctgttgtgtgcctgctgaataacttctatcccagagaggccaaagtacagtggaaggtggataacgccctccaatcgggtaactcccaggagagtgtcacagagcaggacagcaaggacagcacctacagcctcagcagcaccctgacgctgagcaaagcagactacgagaaacacaaagtctacgcctgcgaagtcacccatcagggcctgagctcgcccgtcacaaagagcttcaacaggggagagtgt

SEQ ID NO: 345 - protein, 446 aa, Mus musculus
EVQLVQSGAEVKKPGSSVKVSCKASGFTFTDYIMHWVRQAPGQGLEWMGYINPYNDDTEYNEKFKGRVTITADKSTSTAYMELSSLRSEDTAVYYCARSIYYYDAPFAYWGQGTLVTVSSASTKGPSVFPLAPCSRSTSESTAALGCLVKDYFPEPVTVSWNSGALTSGVHTFPAVLQSSGLYSLSSVVTVPSSNFGTQTYTCNVDHKPSNTKVDKTVERKCCVECPPCPAPPVAGPSVFLFPPKPKDTLMISRTPEVTCVVVDVSHEDPEVQFNWYVDGVEVHNAKTKPREEQFNSTFRVVSVLTVVHQDWLNGKEYKCKVSNKGLPAPIEKTISKTKGQPREPQVYTLPPSREEMTKNQVSLTCLVKGFYPSDIAVEWESNGQPENNYKTTPPMLDSDGSFFLYSKLTVDKSRWQQGNVFSCSVMHEALHNHYTQKSLSLSPGK

SEQ ID NO: 346 - DNA, 1338 bp, Mus musculus
gaggtgcagctggtgcagtctggggctgaggtgaagaagcctgggtcctcggtgaaggtctcctgcaaggcttctggttttaccttcaccgactatattatgcactgggtgcgtcaggcccctggtcaagggcttgagtggatgggctatatcaacccttataatgatgacaccgaatacaacgagaagttcaagggccgtgtcacgattaccgcggacaaatccacgagcacagcctacatggagctgagcagcctgcgctctgaggacacggccgtgtattactgtgcgcgttcgatttattactacgatgccccgtttgcttactggggccaagggactctggtcaccgtctctagtgcctccaccaagggcccatcggtcttccccctggcgccctgctccaggagcacctccgagagcacagcggccctgggctgcctggtcaaggactacttccccgaaccggtgacggtgtcgtggaactcaggcgctctgaccagcggcgtgcacaccttcccagctgtcctacagtcctcaggactctactccctcagcagcgtggtgaccgtgccctccagcaacttcggcacccagacctacacctgcaacgtagatcacaagcccagcaacaccaaggtggacaagacagttgagcgcaaatgttgtgtcgagtgcccaccgtgcccagcaccacctgtggcaggaccgtcagtcttcctcttccccccaaaacccaaggacaccctcatgatctcccggacccctgaggtcacgtgcgtggtggtggacgtgagccacgaagaccccgaggtccagttcaactggtacgtggacggcgtggaggtgcataatgccaagacaaagccacgggaggagcagttcaacagcacgttccgtgtggtcagcgtcctcaccgttgtgcaccaggactggctgaacggcaaggagtacaagtgcaaggtctccaacaaaggcctcccagcccccatcgagaaaaccatctccaaaaccaaagggcagccccgagaaccacaggtgtacaccctgcccccatcccgggaggagatgaccaagaaccaggtcagcctgacctgcctggtcaaaggcttctaccccagcgacatcgccgtggagtgggagagcaatgggcagccggagaacaactacaagaccacacctcccatgctggactccgacggctccttcttcctctacagcaagctcaccgtggacaagagcaggtggcagcaggggaacgtcttctcatgctccgtgatgcatgaggctctgcacaaccactacacgcagaagagcctctccctgtctccgggtaaa

SEQ ID NO: 347 - protein, 465 aa, Mus musculus
MDWTWRILFLVAAATGAHSEVQLVQSGAEVKKPGSSVKVSCKASGFTFTDYIMHWVRQAPGQGLEWMGYINPYNDDTEYNEKFKGRVTITADKSTSTAYMELSSLRSEDTAVYYCARSIYYYDAPFAYWGQGTLVTVSSASTKGPSVFPLAPCSRSTSESTAALGCLVKDYFPEPVTVSWNSGALTSGVHTFPAVLQSSGLYSLSSVVTVPSSNFGTQTYTCNVDHKPSNTKVDKTVERKCCVECPPCPAPPVAGPSVFLFPPKPKDTLMISRTPEVTCVVVDVSHEDPEVQFNWYVDGVEVHNAKTKPREEQFNSTFRVVSVLTVVHQDWLNGKEYKCKVSNKGLPAPIEKTISKTKGQPREPQVYTLPPSREEMTKNQVSLTCLVKGFYPSDIAVEWESNGQPENNYKTTPPMLDSDGSFFLYSKLTVDKSRWQQGNVFSCSVMHEALHNHYTQKSLSLSPGK

SEQ ID NO: 348 - DNA, 1395 bp, Mus musculus; identical to SEQ ID NO: 340

SEQ ID NO: 349 - DNA, 417 bp, Mus musculus
atggaatggatctggatatttctcttcctcctgtcaggaactgcaggtgtccactctgaggtgcagctggtgcagtctggggctgaggtgaagaagcctgggtcctcggtgaaggtctcctgcaaggcttctggttttaccttcaccgactatattatgcactgggtgcgtcaggcccctggtcaagggcttgagtggatgggctatatcaacccttataatgatgacaccgaatacaacgagaagttcaagggccgtgtcacgattaccgcggacaaatccacgagcacagcctacatggagctgagcagcctgcgctctgaggacacggccgtgtattactgtgcgcgttcgatttattactacgatgccccgtttgcttactggggccaagggactctggtcacagtctcgagc

SEQ ID NO: 350 - protein, 218 aa, Mus musculus
DIVLTQSPASLAVSLGQRATIACKASQSVDYDGTSYMNWYQQKPGQPPKLLIYAASNLESEIPARFSGTGSGTDFTLNIHPVEEEDITTYYCQQSNEDPFTFGGGTKLEIKRADAAPTVSIFPPSSEQLTSGGASVVCFLNNFYPKDINVKWKIDGSERQNGVLNSWTDQDSKDSTYSMSSTLTLTKDEYERHNSYTCEATHKTSTSPIVKSFNRNEC

SEQ ID NO: 351 - protein, 15 aa, Mus musculus
KASQSVDYDGTSYMN

SEQ ID NO: 352 - protein, 7 aa, Mus musculus
AASNLES

SEQ ID NO: 353 - protein, 9 aa, Mus musculus
QQSNEDPFT

SEQ ID NO: 354 - DNA, 657 bp, Mus musculus
gacattgtgttgacccagtctccagcttctttggctgtgtctctagggcagagggccaccatcgcctgcaaggccagccaaagtgttgattatgatggtactagttatatgaattggtaccaacagaaaccaggacagccacccaaactcctcatctatgctgcatccaatctagaatctgagatcccagccaggtttagtggcactgggtctgggacagacttcaccctcaacatccatcctgtggaggaggaggatatcacaacctattactgtcagcaaagtaatgaggatccgttcacgttcggaggggggaccaagttggaaataaaacgggctgatgctgcaccaactgtatccatcttcccaccatccagtgagcagttaacatctggaggtgcctcagtcgtgtgcttcttgaacaacttctaccccaaagacatcaatgtcaagtggaagattgatggcagtgaacgacaaaatggcgtcctgaacagttggactgatcaggacagcaaagacagcacctacagcatgagcagcaccctcacgttgaccaaggacgagtatgaacgacataacagctatacctgtgaggccactcacaagacatcaacttcacccattgtcaagagcttcaacaggaatgagtgttag

SEQ ID NO: 355 - protein, 238 aa, Mus musculus
METDTILLWVLLLWVPGSTGDIVLTQSPASLAVSLGQRATIACKASQSVDYDGTSYMNWYQQKPGQPPKLLIYAASNLESEIPARFSGTGSGTDFTLNIHPVEEEDITTYYCQQSNEDPFTFGGGTKLEIKRADAAPTVSIFPPSSEQLTSGGASVVCFLNNFYPKDINVKWKIDGSERQNGVLNSWTDQDSKDSTYSMSSTLTLTKDEYERHNSYTCEATHKTSTSPIVKSFNRNEC

SEQ ID NO: 356 - DNA, 717 bp, Mus musculus
atggagacagacacaatcctgctatgggtgctgctgctctgggttccaggctccactggtgacattgtgttgacccagtctccagcttctttggctgtgtctctagggcagagggccaccatcgcctgcaaggccagccaaagtgttgattatgatggtactagttatatgaattggtaccaacagaaaccaggacagccacccaaactcctcatctatgctgcatccaatctagaatctgagatcccagccaggtttagtggcactgggtctgggacagacttcaccctcaacatccatcctgtggaggaggaggatatcacaacctattactgtcagcaaagtaatgaggatccgttcacgttcggaggggggaccaagttggaaataaaacgggctgatgctgcaccaactgtatccatcttcccaccatccagtgagcagttaacatctggaggtgcctcagtcgtgtgcttcttgaacaacttctaccccaaagacatcaatgtcaagtggaagattgatggcagtgaacgacaaaatggcgtcctgaacagttggactgatcaggacagcaaagacagcacctacagcatgagcagcaccctcacgttgaccaaggacgagtatgaacgacataacagctatacctgtgaggccactcacaagacatcaacttcacccattgtcaagagcttcaacaggaatgagtgttag

SEQ ID NO: 357 - protein, 442 aa, Mus musculus
QVQLQQPGTELVRPGTSVKLSCKASGYIFTTYWMNWVKQRPGQGLEWIGMIHPSASEIRLDQKFKDKATLTLDKSSSTAYMHLSGPTSVDSAVYYCARSGEWGSMDYWGQGTSVTVSSAKTTPPSVYPLAPGSAAQTNSMVTLGCLVKGYFPEPVTVTWNSGSLSSGVHTFPAVLQSDLYTLSSSVTVPSSTWPSETVTCNVAHPASSTKVDKKIVPRDCGCKPCICTVPEVSSVFIFPPKPKDVLTITLTPKVTCVVVDISKDDPEVQFSWFVDDVEVHTAQTQPREEQFNSTFRSVSELPIMHQDWLNGKEFKCRVNSAAFPAPIEKTISKTKGRPKAPQVYTIPPPKEQMAKDKVSLTCMITDFFPEDITVEWQWNGQPAENYKNTQPIMDTDGSYFIYSKLNVQKSNWEAGNTFTCSVLHEGLHNHHTEKSLSHSPGK

SEQ ID NO: 358 - protein, 5 aa, Mus musculus
TYWMN

SEQ ID NO: 359 - protein, 17 aa, Mus musculus
MIHPSASEIRLDQKFKD

SEQ ID NO: 360 - protein, 9 aa, Mus musculus
SGEWGSMDY

SEQ ID NO: 361 - DNA, 1329 bp, Mus musculus
caggtccaactacagcagcctgggactgagctggtgaggcctggaacttcagtgaagttgtcctgtaaggcttctggctacatcttcaccacctactggatgaactgggtgaaacagaggcctggacaaggccttgagtggattggcatgattcatccttccgcaagtgaaattaggttggatcagaaattcaaggacaaggccacattgactcttgacaaatcctccagcacagcctatatgcacctcagcggcccgacatctgtggattctgcggtctattactgtgcaagatcaggggaatgggggtctatggactactggggtcaaggaacctcagtcaccgtctcctcagccaaaacgacacccccatctgtctatccactggcccctggatctgctgcccaaactaactccatggtgaccctgggatgcctggtcaagggctatttccctgagccagtgacagtgacctggaactctggatccctgtccagcggtgtgcacaccttcccagctgtcctgcagtctgacctctacactctgagcagctcagtgactgtcccctccagcacctggcccagcgagaccgtcacctgcaacgttgcccacccggccagcagcaccaaggtggacaagaaaattgtgcccagggattgtggttgtaagccttgcatatgtacagtcccagaagtatcatctgtcttcatcttccccccaaagcccaaggatgtgctcaccattactctgactcctaaggtcacgtgtgttgtggtagacatcagcaaggatgatcccgaggtccagttcagctggtttgtagatgatgtggaggtgcacacagctcagacgcaaccccgggaggagcagttcaacagcactttccgctcagtcagtgaacttcccatcatgcaccaggactggctcaatggcaaggagttcaaatgcagggtcaacagtgcagctttccctgcccccatcgagaaaaccatctccaaaaccaaaggcagaccgaaggctccacaggtgtacaccattccacctcccaaggagcagatggccaaggataaagtcagtctgacctgcatgataacagacttcttccctgaagacattactgtggagtggcagtggaatgggcagccagcggagaactacaagaacactcagcccatcatggacacagatggctcttacttcatctacagcaagctcaatgtgcagaagagcaactgggaggcaggaaatactttcacctgctctgtgttacatgagggcctgcacaaccaccatactgagaagagcctctcccactctcctggtaaatga

SEQ ID NO: 362 - protein, 461 aa, Mus musculus
MGWSSIILFLVATATGVHSQVQLQQPGTELVRPGTSVKLSCKASGYIFTTYWMNWVKQRPGQGLEWIGMIHPSASEIRLDQKFKDKATLTLDKSSSTAYMHLSGPTSVDSAVYYCARSGEWGSMDYWGQGTSVTVSSAKTTPPSVYPLAPGSAAQTNSMVTLGCLVKGYFPEPVTVTWNSGSLSSGVHTFPAVLQSDLYTLSSSVTVPSSTWPSETVTCNVAHPASSTKVDKKIVPRDCGCKPCICTVPEVSSVFIFPPKPKDVLTITLTPKVTCVVVDISKDDPEVQFSWFVDDVEVHTAQTQPREEQFNSTFRSVSELPIMHQDWLNGKEFKCRVNSAAFPAPIEKTISKTKGRPKAPQVYTIPPPKEQMAKDKVSLTCMITDFFPEDITVEWQWNGQPAENYKNTQPIMDTDGSYFIYSKLNVQKSNWEAGNTFTCSVLHEGLHNHHTEKSLSHSPGK

SEQ ID NO: 363 - DNA, 1386 bp, Mus musculus
atgggatggagctctatcatcctcttcttggtagcaacagctacaggtgtccactcccaggtccaactacagcagcctgggactgagctggtgaggcctggaacttcagtgaagttgtcctgtaaggcttctggctacatcttcaccacctactggatgaactgggtgaaacagaggcctggacaaggccttgagtggattggcatgattcatccttccgcaagtgaaattaggttggatcagaaattcaaggacaaggccacattgactcttgacaaatcctccagcacagcctatatgcacctcagcggcccgacatctgtggattctgcggtctattactgtgcaagatcaggggaatgggggtctatggactactggggtcaaggaacctcagtcaccgtctcctcagccaaaacgacacccccatctgtctatccactggcccctggatctgctgcccaaactaactccatggtgaccctgggatgcctggtcaagggctatttccctgagccagtgacagtgacctggaactctggatccctgtccagcggtgtgcacaccttcccagctgtcctgcagtctgacctctacactctgagcagctcagtgactgtcccctccagcacctggcccagcgagaccgtcacctgcaacgttgcccacccggccagcagcaccaaggtggacaagaaaattgtgcccagggattgtggttgtaagccttgcatatgtacagtcccagaagtatcatctgtcttcatcttccccccaaagcccaaggatgtgctcaccattactctgactcctaaggtcacgtgtgttgtggtagacatcagcaaggatgatcccgaggtccagttcagctggtttgtagatgatgtggaggtgcacacagctcagacgcaaccccgggaggagcagttcaacagcactttccgctcagtcagtgaacttcccatcatgcaccaggactggctcaatggcaaggagttcaaatgcagggtcaacagtgcagctttccctgcccccatcgagaaaaccatctccaaaaccaaaggcagaccgaaggctccacaggtgtacaccattccacctcccaaggagcagatggccaaggataaagtcagtctgacctgcatgataacagacttcttccctgaagacattactgtggagtggcagtggaatgggcagccagcggagaactacaagaacactcagcccatcatggacacagatggctcttacttcatctacagcaagctcaatgtgcagaagagcaactgggaggcaggaaatactttcacctgctctgtgttacatgagggcctgcacaaccaccatactgagaagagcctctcccactctcctggtaaatga

SEQ ID NO: 364 - protein, 106 aa, Mus musculus
DIQMTQSPSSLSASVGDRVTITCRASQDISSYLNWYQQKPGKAPKLLIYSTSRLNSGVPSRFSGSGSGTDFTLTISSLQPEDFATYYCQQDIKHPTFGQGTKVEIK

SEQ ID NO: 365 - DNA, 318 bp, Mus musculus
gacatccagatgacccagtctccatcctccctgtctgcatctgtaggtgaccgtgtcaccatcacttgccgcgcaagtcaggatattagcagctatttaaattggtatcagcagaaaccagggaaagcccctaagctcctgatctattctacttcccgtttgaatagtggggtcccatcacgcttcagtggcagtggctctgggacagatttcactctcaccatcagcagtctgcaacctgaagattttgcaacttactactgtcaacaggatattaaacaccctacgttcggtcaaggcaccaaggtggagatcaaa

SEQ ID NO: 366 - protein, 120 aa, Mus musculus; identical to SEQ ID NO: 329

SEQ ID NO: 367 - DNA, 360 bp, Mus musculus
gaggtgcagctggtgcagtctggggctgaggtgaagaagcctgggtcctcggtgaaggtctcctgcaaggcttctggttttaccttcaccgactatattatgcactgggtgcgtcaggcccctggtcaagggcttgagtggatgggctatatcaacccttataatgatgacaccgaatacaacgagaagttcaagggccgtgtcacgattaccgcggacaaatccacgagcacagcctacatggagctgagcagcctgcgctctgaggacacggccgtgtattactgtgcgcgttcgatttattactacgatgccccgtttgcttactggggccaagggactctggtcaccgtctctagt

SEQ ID NO: 368 - protein, 108 aa, Mus musculus; identical to SEQ ID NO: 336

SEQ ID NO: 369 - DNA, 324 bp, Mus musculus; identical to SEQ ID NO: 337

SEQ ID NO: 370 - protein, 119 aa, Mus musculus; identical to SEQ ID NO: 338

SEQ ID NO: 371 - DNA, 357 bp, Mus musculus; identical to SEQ ID NO: 339

SEQ ID NO: 372 - protein, 108 aa, Mus musculus
DIQLTQSPSFLSASVGDRVTITCSVSSSISSSNLHWYQQKPGKAPKLLIYGTSNLASGVPSRFSGSGSGTEFTLTISSLQPEDFATYYCQQWTTTYTFGQGTKLEIKR

SEQ ID NO: 373 - DNA, 324 bp, Mus musculus
gatattcagctgacccagagcccgagctttctgagcgcgagcgtgggcgatcgcgtgaccattacctgcagcgtgagcagcagcattagcagcagcaacctgcattggtatcagcagaaaccgggcaaagcgccgaaactgctgatttatggcaccagcaacctggcgagcggcgtgccgagccgctttagcggcagcggcagcggcaccgaatttaccctgaccattagcagcctgcagccggaagattttgcgacctattattgccagcagtggaccaccacctatacctttggccagggcaccaaactggaaattaaacgt

SEQ ID NO: 374 - protein, 122 aa, Mus musculus
EVQLVQSGAEVKKPGASVKVSCKASGFNIKDYYIHWVRQAPGQGLEWMGRIDPDNGESTYVPKFQGRVTMTTDTSTSTAYMELRSLRSDDTAVYYCAREGLDYGDYYAVDYWGQGTLVTVSS

SEQ ID NO: 375 - DNA, 366 bp, Mus musculus
gaagtgcagctggtgcagagcggcgcggaagtgaaaaaaccgggcgcgagcgtgaaagtgagctgcaaagcgagcggctttaacattaaagattattatattcattgggtgcgccaggcgccgggccagggcctggaatggatgggccgcattgatccggataacggcgaaagcacctatgtgccgaaatttcagggccgcgtgaccatgaccaccgataccagcaccagcaccgcgtatatggaactgcgcagcctgcgcagcgatgataccgcggtgtattattgcgcgcgcgaaggcctggattatggcgattattatgcggtggattattggggccagggcaccctggtgaccgtctcgagc

SEQ ID NO: 376 - protein, 107 aa, Mus musculus [sequence omitted]

SEQ ID NO: 377 - DNA, 321 bp, Mus musculus
gacatccagatgacccagtctccatcctccctctccgcatccgtaggcgaccgcgtaaccataacatgtagagcatctcaagatatttccaactatttgaattggtaccaacaaaaacccggcaaagcacctaaactcctcatttactatacatcaagactcctctccggcgttccatcacgattctcaggctccggctccggcacagatttcacactcactatttcctccctccaaccagaagattttgcaacctattactgtcaacaaggcgatacactcccatacacattcggcggcggcacaaaagttgaaattaaa

SEQ ID NO: 378 - protein, 123 aa, Mus musculus [sequence omitted]

SEQ ID NO: 379 - DNA, 369 bp, Mus musculus
gaggtgcagctggtgcagagcggcgccgaggtaaaaaaaccaggagcaagcgttaaagtttcttgtaaagcaagcggatatacatttacagattacaacatgcattgggtaagacaagcgccaggacaaggattggaatggatgggcgaaattaaccctaatagtggaggagcaggctacaatcaaaaattcaaagggagagttacaatgacaacagacacaagcacttcaacagcatatatggaactgcgatcacttagaagcgacgatacagctgtatactattgcgcacgacttgggtatgatgatatatatgatgactggtatttcgatgtttggggccagggaacaacagttaccgtctctagt

SEQ ID NO: 380 - protein, 108 aa, Mus musculus
DIQLTQSPSFLSASVGDRVTITCRASSSVTSSYLNWYQQKPGKAPKLLIYSTSNLASGVPSRFSGSGSGTEFTLTISSLQPEDFATYYCQQYDFFPSTFGGGTKVEIK

SEQ ID NO: 381 - DNA, 324 bp, Mus musculus
gacatccagctgacccagagccccagcttcctttccgcatccgttggtgaccgagtaacaatcacatgccgcgcctcatcttcagttacatcttcttatcttaattggtatcaacaaaaaccaggaaaagcacctaaacttcttatatactctacatctaatctcgcatcaggagttccctctcgattttcaggatctggatcaggcacagaatttacacttactatatcatcactccaaccagaagacttcgccacttattactgccaacaatacgatttttttccaagcacattcggaggaggtacaaaagtagaaatcaag

SEQ ID NO: 382 - protein, 121 aa, Mus musculus
EVQLVQSGAEVKKPGASVKVSCKASGYTFTDYYMNWVRQAPGQRLEWMGDINPYNDDTTYNHKFKGRVTITRDTSASTAYMELSSLRSEDTAVYYCARETAVITTNAMDYWGQGTTVTVSS

SEQ ID NO: 383 - DNA, 363 bp, Mus musculus
gaggtgcagctggtgcagagcggcgccgaggtcaagaaacctggagcaagcgtaaaggttagttgcaaagcatctggatacacatttaccgactactacatgaattgggtacgacaagcccctggacaaagacttgaatggatgggagacattaacccttataacgacgacactacatacaatcataaatttaaaggaagagttacaattacaagagatacatccgcatcaaccgcctatatggaactttcctcattgagatctgaagacactgctgtttattactgtgcaagagaaactgccgttattactactaacgctatggattactggggtcaaggaaccactgttaccgtctctagt

SEQ ID NO: 384 - protein, 108 aa, Mus musculus
DIQMTQSPSSLSASVGDRVTITCSVSSTISSNHLHWFQQKPGKAPKSLIYGTSNLASGVPSRFSGSGSGTDFTLTISSLQPEDFATYYCQQWSSYPLTFGGGTKVEIK

SEQ ID NO: 385 - DNA, 324 bp, Mus musculus
gacatccagatgacccagtctccatcctccctctcagcatccgtaggcgatagagttacaataacatgcagcgtatcatcaactatatcatcaaatcatcttcattggttccaacagaaacccggcaaagcacctaaatcacttatatacggcacatcaaatctcgcatcaggcgttccttcaagattttcaggctctggctcaggcaccgactttactcttacaatatcctccctccaacccgaagacttcgcaacctattactgtcaacaatggtcctcatatccactcacatttggcggcggcacaaaagtagaaattaaa

SEQ ID NO: 386 - protein, 125 aa, Mus musculus
EVQLVQSGAEVKKPGASVKVSCKASDFNIKDFYLHWVRQAPGQGLEWIGRIDPENGDTLYDPKFQDKVTMTTDTSTSTAYMELRSLRSDDTAVYYCAREADYFHDGTSYWYFDVWGRGTLVTVSS

SEQ ID NO: 387 - DNA, 375 bp, Mus musculus
gaggtgcagctggtgcagtctggggctgaggtgaagaagcctggggcctcagtgaaggtctcctgcaaggcttctgacttcaacattaaagacttctatctacactgggtgcgacaggcccctggacaagggcttgagtggattggaaggattgatcctgagaatggtgatactttatatgacccgaagttccaggacaaggtcaccatgaccacagacacgtccaccagcacagcctacatggagctgaggagcctgagatctgacgacacggccgtgtattactgtgcgagagaggcggattatttccacgatggtacctcctactggtacttcgatgtctggggccgtggcaccctggtcaccgtctctagt

SEQ ID NO: 388 - protein, 106 aa, Mus musculus
DIQLTQSPSFLSASVGDRVTITCRASSSISYIHWYQQKPGKAPKLLIYATSNLASGVPSRFSGSGSGTEFTLTISSLQPEDFATYYCQQWSSDPLTFGGGTKVEIK

SEQ ID NO: 389 - DNA, 318 bp, Mus musculus
gacatccagttgacccagtctccatccttcctgtctgcatctgtaggagacagagtcaccatcacttgcagggccagctcaagtataagttacatacactggtatcagcaaaaaccagggaaagcccctaagctcctgatctatgccacatccaacctggcttctggggtcccatcaaggttcagcggcagtggatctgggacagaattcactctcacaatcagcagcctgcagcctgaagattttgcaacttattactgtcagcagtggagtagtgacccactcacgttcggcggagggaccaaggtggagatcaaa

SEQ ID NO: 390 - protein, 121 aa, Mus musculus
EVQLVQSGAEVKKPGASVKVSCKASGFDIKDYYIHWVRQAPGQGLEWIGRVDPDNGETEFAPKFPGKVTMTTDTSISTAYMELSRLRSDDTAVYYCAREDYDGTYTWFPYWGQGTLVTVSS

SEQ ID NO: 391 - DNA, 363 bp, Mus musculus
gaggtgcagctggtgcagtctggggctgaggtgaagaagcctggggcctcagtgaaggtctcctgcaaggcttctggattcgacattaaggactactatatacactgggtgcgacaggcccctggacaagggcttgagtggatcggaagggttgatcctgacaatggtgagactgaatttgccccgaagttcccgggcaaggtcaccatgaccacagacacgtccatcagcacagcctacatggagctgagcaggctgagatctgacgacacggccgtgtattactgtgcgagagaagactacgatggtacctacacctggtttccttattggggccaagggactctggtcaccgtctctagt

SEQ ID NO: 392 - protein, 448 aa, Artificial Sequence
  Synthetic Polypeptide
  MISC_FEATURE: Humanized Antibody Sequence
EVQLVQSGAEVKKPGASVKVSCKASGYTFTDYNMHWVRQAPGQGLEWMGEINPNSGGAGYNQKFKGRVTMTTDTSTSTAYMELRSLRSDDTAVYYCARLGYDDIYDDWYFDVWGQGTTVTVSSASTKGPSVFPLAPCSRSTSESTAALGCLVKDYFPEPVTVSWNSGALTSGVHTFPAVLQSSGLYSLSSVVTVPSSNFGTQTYTCNVDHKPSNTKVDKTVERKCCVECPPCPAPPVAGPSVFLFPPKPKDTLMISRTPEVTCVVVDVSHEDPEVQFNWYVDGVEVHNAKTKPREEQFNSTFRVVSVLTVVHQDWLNGKEYKCKVSNKGLPAPIEKTISKTKGQPREPQVYTLPPSREEMTKNQVSLTCLVKGFYPSDIAVEWESNGQPENNYKTTPPMLDSDGSFFLYSKLTVDKSRWQQGNVFSCSVMHEALHNHYTQKSLSLSPG

SEQ ID NO: 393 - protein, 446 aa, Artificial Sequence
  Synthetic Polypeptide
  MISC_FEATURE: Humanized Antibody Sequence
EVQLVQSGAEVKKPGASVKVSCKASGYTFTDYYMNWVRQAPGQRLEWMGDINPYNDDTTYNHKFKGRVTITRDTSASTAYMELSSLRSEDTAVYYCARETAVITTNAMDYWGQGTTVTVSSASTKGPSVFPLAPCSRSTSESTAALGCLVKDYFPEPVTVSWNSGALTSGVHTFPAVLQSSGLYSLSSVVTVPSSNFGTQTYTCNVDHKPSNTKVDKTVERKCCVECPPCPAPPVAGPSVFLFPPKPKDTLMISRTPEVTCVVVDVSHEDPEVQFNWYVDGVEVHNAKTKPREEQFNSTFRVVSVLTVVHQDWLNGKEYKCKVSNKGLPAPIEKTISKTKGQPREPQVYTLPPSREEMTKNQVSLTCLVKGFYPSDIAVEWESNGQPENNYKTTPPMLDSDGSFFLYSKLTVDKSRWQQGNVFSCSVMHEALHNHYTQKSLSLSPG

SEQ ID NO: 394 - protein, 450 aa, Artificial Sequence
  Synthetic Polypeptide
  MISC_FEATURE: Humanized Antibody Sequence
EVQLVQSGAEVKKPGASVKVSCKASDFNIKDFYLHWVRQAPGQGLEWIGRIDPENGDTLYDPKFQDKVTMTTDTSTSTAYMELRSLRSDDTAVYYCAREADYFHDGTSYWYFDVWGRGTLVTVSSASTKGPSVFPLAPCSRSTSESTAALGCLVKDYFPEPVTVSWNSGALTSGVHTFPAVLQSSGLYSLSSVVTVPSSNFGTQTYTCNVDHKPSNTKVDKTVERKCCVECPPCPAPPVAGPSVFLFPPKPKDTLMISRTPEVTCVVVDVSHEDPEVQFNWYVDGVEVHNAKTKPREEQFNSTFRVVSVLTVVHQDWLNGKEYKCKVSNKGLPAPIEKTISKTKGQPREPQVYTLPPSREEMTKNQVSLTCLVKGFYPSDIAVEWESNGQPENNYKTTPPMLDSDGSFFLYSKLTVDKSRWQQGNVFSCSVMHEALHNHYTQKSLSLSPG

SEQ ID NO: 395 - protein, 446 aa, Artificial Sequence
  Synthetic Polypeptide
  MISC_FEATURE: Humanized Antibody Sequence
EVQLVQSGAEVKKPGASVKVSCKASGFDIKDYYIHWVRQAPGQGLEWIGRVDPDNGETEFAPKFPGKVTMTTDTSISTAYMELSRLRSDDTAVYYCAREDYDGTYTWFPYWGQGTLVTVSSASTKGPSVFPLAPCSRSTSESTAALGCLVKDYFPEPVTVSWNSGALTSGVHTFPAVLQSSGLYSLSSVVTVPSSNFGTQTYTCNVDHKPSNTKVDKTVERKCCVECPPCPAPPVAGPSVFLFPPKPKDTLMISRTPEVTCVVVDVSHEDPEVQFNWYVDGVEVHNAKTKPREEQFNSTFRVVSVLTVVHQDWLNGKEYKCKVSNKGLPAPIEKTISKTKGQPREPQVYTLPPSREEMTKNQVSLTCLVKGFYPSDIAVEWESNGQPENNYKTTPPMLDSDGSFFLYSKLTVDKSRWQQGNVFSCSVMHEALHNHYTQKSLSLSPG

SEQ ID NO: 396 - protein, 445 aa, Artificial Sequence
  Synthetic Polypeptide
  MISC_FEATURE: Humanized Antibody Sequence
EVQLVQSGAEVKKPGSSVKVSCKASGFTFTDYIMHWVRQAPGQGLEWMGYINPYNDDTEYNEKFKGRVTITADKSTSTAYMELSSLRSEDTAVYYCARSIYYYDAPFAYWGQGTLVTVSSASTKGPSVFPLAPCSRSTSESTAALGCLVKDYFPEPVTVSWNSGALTSGVHTFPAVLQSSGLYSLSSVVTVPSSNFGTQTYTCNVDHKPSNTKVDKTVERKCCVECPPCPAPPVAGPSVFLFPPKPKDTLMISRTPEVTCVVVDVSHEDPEVQFNWYVDGVEVHNAKTKPREEQFNSTFRVVSVLTVVHQDWLNGKEYKCKVSNKGLPAPIEKTISKTKGQPREPQVYTLPPSREEMTKNQVSLTCLVKGFYPSDIAVEWESNGQPENNYKTTPPMLDSDGSFFLYSKLTVDKSRWQQGNVFSCSVMHEALHNHYTQKSLSLSPG

SEQ ID NO: 397 - protein, 213 aa, Homo sapiens
MQLPLALCLVCLLVHTAFRVVEGQGWQAFKNDATEIIPELGEYPEPPPELENNKTMNRAENGGRPPHHPFETKDVSEYSCRELHFTRYVTDGPCRSAKPVTELVCSGQCGPARLLPNAIGRGKWWRPSGPDFRCIPDRYRAQRVQLLCPGGEAPRARKVRLVASCKCKRLTRFHNQSELKDFGTEAARPQKGRKPRPRARSAKANQAELENAY

SEQ ID NO: 398 - protein, 444 aa, Artificial
  Miscellaneous construct
QVQLVQSGAEVKKPGSSVKVSCKASGYTFTDYFLNWVRQAPGQGLEWMGTIYPYHDGTTYSQKFKGRVTITADKSTSTAYMELSSLRSEDTAVYYCAREEEDGQFDYWGQGTTVTVSSASTKGPSVFPLAPCSRSTSESTAALGCLVKDYFPEPVTVSWNSGALTSGVHTFPAVLQSSGLYSLSSVVTVPSSSLGTKTYTCNVDHKPSNTKVDKRVESKYGPPCPPCPAPEFLGGPSVFLFPPKPKDTLMISRTPEVTCVVVDVSQEDPEVQFNWYVDGVEVHNAKTKPREEQFNSTYRVVSVLTVLHQDWLNGKEYKCKVSNKGLPSSIEKTISKAKGQPREPQVYTLPPSQEEMTKNQVSLTCLVKGFYPSDIAVEWESNGQPENNYKTTPPVLDSDGSFFLYSRLTVDKSRWQEGNVFSCSVMHEALHNHYTQKSLSLSLG

SEQ ID NO: 399 - protein, 444 aa, Artificial
  Miscellaneous construct
QVQLVQSGAEVKKPGASVKVSCKVSGFPIKDTFQHWVRQAPGKGLEWMGWSDPEIGDTEYASKFQGRVTMTEDTSTDTAYMELSSLRSEDTAVYYCATGDTTYKFDFWGQGTTVTVSSASTKGPSVFPLAPCSRSTSESTAALGCLVKDYFPEPVTVSWNSGALTSGVHTFPAVLQSSGLYSLSSVVTVPSSSLGTKTYTCNVDHKPSNTKVDKRVESKYGPPCPPCPAPEFLGGPSVFLFPPKPKDTLMISRTPEVTCVVVDVSQEDPEVQFNWYVDGVEVHNAKTKPREEQFNSTYRVVSVLTVLHQDWLNGKEYKCKVSNKGLPSSIEKTISKAKGQPREPQVYTLPPSQEEMTKNQVSLTCLVKGFYPSDIAVEWESNGQPENNYKTTPPVLDSDGSFFLYSRLTVDKSRWQEGNVFSCSVMHEALHNHYTQKSLSLSLG

SEQ ID NO: 400 - protein, 450 aa, Artificial
  Miscellaneous construct
EVQLVQSGAEVKKPGESLKISCKGSDFEIKDYYIHWVRQMPGKGLEWMGQIDAEDGETEYAPRFQGQVTISADKSISTAYLQWSSLKASDTAMYYCAREGYYYDGRDYWYFDVWGQGTTVTVSSASTKGPSVFPLAPCSRSTSESTAALGCLVKDYFPEPVTVSWNSGALTSGVHTFPAVLQSSGLYSLSSVVTVPSSSLGTKTYTCNVDHKPSNTKVDKRVESKYGPPCPPCPAPEFLGGPSVFLFPPKPKDTLMISRTPEVTCVVVDVSQEDPEVQFNWYVDGVEVHNAKTKPREEQFNSTYRVVSVLTVLHQDWLNGKEYKCKVSNKGLPSSIEKTISKAKGQPREPQVYTLPPSQEEMTKNQVSLTCLVKGFYPSDIAVEWESNGQPENNYKTTPPVLDSDGSFFLYSRLTVDKSRWQEGNVFSCSVMHEALHNHYTQKSLSLSLG

SEQ ID NO: 401 - protein, 214 aa, Artificial
  Miscellaneous construct
DIQMTQSPSSLSASVGDRVTITCSASQGIQWYLNWYQQKPGKAPKLLIYYTSSLHSGVPSRFSGSGSGTDFTLTISSLQPEDFATYYCQQHSKLPRTFGGGTKVEIKRTVAAPSVFIFPPSDEQLKSGTASVVCLLNNFYPREAKVQWKVDNALQSGNSQESVTEQDSKDSTYSLSSTLTLSKADYEKHKVYACEVTHQGLSSPVTKSFNRGEC

SEQ ID NO: 402 - protein, 214 aa, Artificial
  Miscellaneous construct
DIQMTQSPSSLSASVGDRVTITCKASQDVHTAVAWYQQKPGKAPKLLIYWASTRWTGVPSRFSGSGSGTDFTLTISSLQPEDFATYYCQQYSDYPWTFGGGTKVEIKRTVAAPSVFIFPPSDEQLKSGTASVVCLLNNFYPREAKVQWKVDNALQSGNSQESVTEQDSKDSTYSLSSTLTLSKADYEKHKVYACEVTHQGLSSPVTKSFNRGEC

SEQ ID NO: 403 - protein, 213 aa, Artificial
  Miscellaneous construct
EIVLTQSPATLSLSPGERATLSCSASSSVSYIHWYQQKPGQAPRLLIYSTSELASGIPARFSGSGSGTDFTLTISSLEPEDFAVYYCQQLSHLPLTFGGGTKVEIKRTVAAPSVFIFPPSDEQLKSGTASVVCLLNNFYPREAKVQWKVDNALQSGNSQESVTEQDSKDSTYSLSSTLTLSKADYEKHKVYACEVTHQGLSSPVTKSFNRGEC

SEQ ID NO: 404 - DNA, 1332 bp, Artificial
  Miscellaneous construct
caggtgcagctggtgcagtctggggctgaggtgaagaagcctgggtcctcagtgaaggtttcctgcaaggcatctggatacacattcactgactactttctgaactgggtgcgacaggcccctggacaagggcttgagtggatgggaactatttatccttaccatgatggtactacctactctcagaagttcaagggcagagtcaccattaccgcggacaaatccacgagcacagcctacatggagctgagcagcctgagatctgaggacacggccgtgtattactgtgcgagagaggaagaggatggtcagttcgactactggggccaaggaaccacggtcaccgtctcctcagcctccaccaagggcccatcggtcttcccgctagcgccctgctccaggagcacctccgagagcacagccgccctgggctgcctggtcaaggactacttccccgaaccggtgacggtgtcgtggaactcaggcgccctgaccagcggcgtgcacaccttcccggctgtcctacagtcctcaggactctactccctcagcagcgtggtgaccgtgccctccagcagcttgggcacgaagacctacacctgcaacgtagatcacaagcccagcaacaccaaggtggacaagagagttgagtccaaatatggtcccccatgcccaccctgcccagcacctgagttcctggggggaccatcagtcttcctgttccccccaaaacccaaggacactctcatgatctcccggacccctgaggtcacgtgcgtggtggtggacgtgagccaggaagaccccgaggtccagttcaactggtacgtggatggcgtggaggtgcataatgccaagacaaagccgcgggaggagcagttcaacagcacgtaccgtgtggtcagcgtcctcaccgtcctgcaccaggactggctgaacggcaaggagtacaagtgcaaggtctccaacaaaggcctcccgtcctccatcgagaaaaccatctccaaagccaaagggcagccccgagagccacaggtgtacaccctgcccccatcccaggaggagatgaccaagaaccaggtcagcctgacctgcctggtcaaaggcttctaccccagcgacatcgccgtggagtgggaaagcaatgggcagccggagaacaactacaagaccacgcctcccgtgctggactccgacggctccttcttcctctacagcaggctaaccgtggacaagagcaggtggcaggaggggaatgtcttctcatgctccgtgatgcatgaggctctgcacaaccactacacacagaagagcctctccctgtctctgggt

SEQ ID NO: 405 - DNA, 1332 bp, Artificial
  Miscellaneous construct
caggttcagctggtgcagtctggggctgaggtgaagaagcctggggcctcagtgaaggtctcctgcaaggtttccggcttccccattaaggacacctttcagcactgggtgcgacaggctcctggaaaagggcttgagtggatgggatggagcgatcctgagatcggtgatactgaatatgcctcgaagttccagggcagagtcaccatgaccgaggacacatctacagacacagcctacatggagctgagcagcctgagatctgaggacacggccgtgtattactgtgcaacaggcgacaccacatacaagtttgacttctgggggcaagggaccacggtcaccgtctcctcagcctccaccaagggcccatcggtcttcccgctagcgccctgctccaggagcacctccgagagcacagccgccctgggctgcctggtcaaggactacttccccgaaccggtgacggtgtcgtggaactcaggcgccctgaccagcggcgtgcacaccttcccggctgtcctacagtcctcaggactctactccctcagcagcgtggtgaccgtgccctccagcagcttgggcacgaagacctacacctgcaacgtagatcacaagcccagcaacaccaaggtggacaagagagttgagtccaaatatggtcccccatgcccaccctgcccagcacctgagttcctggggggaccatcagtcttcctgttccccccaaaacccaaggacactctcatgatctcccggacccctgaggtcacgtgcgtggtggtggacgtgagccaggaagaccccgaggtccagttcaactggtacgtggatggcgtggaggtgcataatgccaagacaaagccgcgggaggagcagttcaacagcacgtaccgtgtggtcagcgtcctcaccgtcctgcaccaggactggctgaacggcaaggagtacaagtgcaaggtctccaacaaaggcctcccgtcctccatcgagaaaaccatctccaaagccaaagggcagccccgagagccacaggtgtacaccctgcccccatcccaggaggagatgaccaagaaccaggtcagcctgacctgcctggtcaaaggcttctaccccagcgacatcgccgtggagtgggaaagcaatgggcagccggagaacaactacaagaccacgcctcccgtgctggactccgacggctccttcttcctctacagcaggctaaccgtggacaagagcaggtggcaggaggggaatgtcttctcatgctccgtgatgcatgaggctctgcacaaccactacacacagaagagcctctccctgtctctgggt

SEQ ID NO: 406 - DNA, 1350 bp, Artificial
  Miscellaneous construct
gaggtgcagctggtgcagtctggagcagaggtgaaaaagcccggggagtctctgaagatctcctgtaagggttctgacttcgagattaaagactactatatacattgggtgcgccagatgcccgggaaaggcctggagtggatggggcagattgatgctgaggatggtgaaactgaatatgccccgaggttccagggccaggtcaccatctcagccgacaagtccatcagcaccgcctacctgcagtggagcagcctgaaggcctcggacaccgccatgtattactgtgcgagagagggttattactacgatgggcgcgactactggtacttcgatgtctggggccaagggaccacggtcaccgtctcctcagcctccaccaagggcccatcggtcttcccgctagcgccctgctccaggagcacctccgagagcacagccgccctgggctgcctggtcaaggactacttccccgaaccggtgacggtgtcgtggaactcaggcgccctgaccagcggcgtgcacaccttcccggctgtcctacagtcctcaggactctactccctcagcagcgtggtgaccgtgccctccagcagcttgggcacgaagacctacacctgcaacgtagatcacaagcccagcaacaccaaggtggacaagagagttgagtccaaatatggtcccccatgcccaccctgcccagcacctgagttcctggggggaccatcagtcttcctgttccccccaaaacccaaggacactctcatgatctcccggacccctgaggtcacgtgcgtggtggtggacgtgagccaggaagaccccgaggtccagttcaactggtacgtggatggcgtggaggtgcataatgccaagacaaagccgcgggaggagcagttcaacagcacgtaccgtgtggtcagcgtcctcaccgtcctgcaccaggactggctgaacggcaaggagtacaagtgcaaggtctccaacaaaggcctcccgtcctccatcgagaaaaccatctccaaagccaaagggcagccccgagagccacaggtgtacaccctgcccccatcccaggaggagatgaccaagaaccaggtcagcctgacctgcctggtcaaaggcttctaccccagcgacatcgccgtggagtgggaaagcaatgggcagccggagaacaactacaagaccacgcctcccgtgctggactccgacggctccttcttcctctacagcaggctaaccgtggacaagagcaggtggcaggaggggaatgtcttctcatgctccgtgatgcatgaggctctgcacaaccactacacacagaagagcctctccctgtctctgggt

SEQ ID NO: 407 - DNA, 642 bp, Artificial
  Miscellaneous construct
gacatccagatgacccagtctccatcctctctgtctgcatctgtaggagacagagtcaccatcacttgcagtgcaagtcagggcattcagtggtatttaaactggtatcagcagaaaccagggaaagcccctaagctcctgatctattacacatcaagtttacactcaggggtcccatcaaggttcagtggcagtggatctgggacagatttcactctcaccatcagcagtctgcaacctgaagattttgcaacttactactgtcagcagcatagtaaacttcctcggacgttcggcggagggaccaaggtggagatcaaacggactgtggctgcaccatctgtcttcatcttcccgccatctgatgagcagttgaaatctggaactgcctctgttgtgtgcctgctgaataacttctatcccagagaggccaaagtacagtggaaggtggataacgccctccaatcgggtaactcccaggagagtgtcacagagcaggacagcaaggacagcacctacagcctcagcagcaccctgacgctgagcaaagcagactacgagaaacacaaagtctacgcctgcgaagtcacccatcagggcctgagctcgcccgtcacaaagagcttcaacaggggagagtgc

SEQ ID NO: 408 - DNA, 642 bp, Artificial
  Miscellaneous construct
gacatccagatgacccagtctccatcctccctgtctgcatctgtaggagacagagtcaccatcacttgcaaggccagtcaggatgtgcacactgctgtagcctggtatcagcagaaaccagggaaagcccctaagctcctgatctattgggcatccacccggtggactggagtcccatcaaggttcagtggcagtggatctgggacagatttcactctcaccatcagcagtctgcaacctgaagattttgcaacttactactgtcagcaatatagcgattatccgtggacgttcggcggagggaccaaggtggagatcaaacggactgtggctgcaccatctgtcttcatcttcccgccatctgatgagcagttgaaatctggaactgcctctgttgtgtgcctgctgaataacttctatcccagagaggccaaagtacagtggaaggtggataacgccctccaatcgggtaactcccaggagagtgtcacagagcaggacagcaaggacagcacctacagcctcagcagcaccctgacgctgagcaaagcagactacgagaaacacaaagtctacgcctgcgaagtcacccatcagggcctgagctcgcccgtcacaaagagcttcaacaggggagagtgc

SEQ ID NO: 409 - DNA, 639 bp, Artificial
  Miscellaneous construct
gaaattgtgttgacacagtctccagccaccctgtctttgtctccaggggaaagagccaccctctcctgcagtgccagctcaagtgtaagttacatccactggtaccaacagaaacctggccaggctcccaggctcctcatctatagcacatccgagctggcttctggcatcccagccaggttcagtggcagtgggtctgggacagacttcactctcaccatcagcagcctagagcctgaagattttgcagtttattactgtcagcagcttagtcatctcccgctcacgttcggcggagggaccaaggtggagatcaaacgaactgtggctgcaccatctgtcttcatcttcccgccatctgatgagcagttgaaatctggaactgcctctgttgtgtgcctgctgaataacttctatcccagagaggccaaagtacagtggaaggtggataacgccctccaatcgggtaactcccaggagagtgtcacagagcaggacagcaaggacagcacctacagcctcagcagcaccctgacgctgagcaaagcagactacgagaaacacaaagtctacgcctgcgaagtcacccatcagggcctgagctcgcccgtcacaaagagcttcaacaggggagagtgc

SEQ ID NO: 410 - protein, 118 aa, Artificial
  Miscellaneous construct
QVQLVQSGAEVKKPGSSVKVSCKASGYTFTDYFLNWVRQAPGQGLEWMGTIYPYHDGTTYSQKFKGRVTITADKSTSTAYMELSSLRSEDTAVYYCAREEEDGQFDYWGQGTTVTVSS

SEQ ID NO: 411 - protein, 118 aa, Artificial [sequence omitted]

SEQ ID NO: 412 - protein, 124 aa, Artificial
  Miscellaneous construct
EVQLVQSGAEVKKPGESLKISCKGSDFEIKDYYIHWVRQMPGKGLEWMGQIDAEDGETEYAPRFQGQVTISADKSISTAYLQWSSLKASDTAMYYCAREGYYYDGRDYWYFDVWGQGTTVTVSS

SEQ ID NO: 413 - protein, 107 aa, Artificial
  Miscellaneous construct
DIQMTQSPSSLSASVGDRVTITCSASQGIQWYLNWYQQKPGKAPKLLIYYTSSLHSGVPSRFSGSGSGTDFTLTISSLQPEDFATYYCQQHSKLPRTFGGGTKVEIK

SEQ ID NO: 414 - protein, 107 aa, Artificial [sequence omitted]

SEQ ID NO: 415 - protein, 106 aa, Artificial
  Miscellaneous construct
EIVLTQSPATLSLSPGERATLSCSASSSVSYIHWYQQKPGQAPRLLIYSTSELASGIPARFSGSGSGTDFTLTISSLEPEDFAVYYCQQLSHLPLTFGGGTKVEIK

SEQ ID NO: 416 - protein, 10 aa, Artificial
  Miscellaneous construct
GYTFTDYFLN

SEQ ID NO: 417 - protein, 17 aa, Artificial
  Miscellaneous construct
TIYPYHDGTTYSQKFKG

SEQ ID NO: 418 - protein, 9 aa, Artificial
  Miscellaneous construct
EEEDGQFDY

SEQ ID NO: 419 - protein, 11 aa, Artificial
  Miscellaneous construct
SASQGIQWYLN

SEQ ID NO: 420 - protein, 7 aa, Artificial
  Miscellaneous construct
YTSSLHS

SEQ ID NO: 421 - protein, 9 aa, Artificial
  Miscellaneous construct
QQHSKLPRT

SEQ ID NO: 422 - protein, 10 aa, Artificial
  Miscellaneous construct
GFPIKDTFQH

SEQ ID NO: 423 - protein, 17 aa, Artificial
  Miscellaneous construct
WSDPEIGDTEYASKFQG

SEQ ID NO: 424 - protein, 9 aa, Artificial
  Miscellaneous construct
GDTTYKFDF

SEQ ID NO: 425 - protein, 11 aa, Artificial
  Miscellaneous construct
KASQDVHTAVA

SEQ ID NO: 426 - protein, 7 aa, Artificial
  Miscellaneous construct
WASTRWT

SEQ ID NO: 427 - protein, 9 aa, Artificial
  Miscellaneous construct
QQYSDYPWT

SEQ ID NO: 428 - protein, 10 aa, Artificial
  Miscellaneous construct
DFEIKDYYIH

SEQ ID NO: 429 - protein, 17 aa, Artificial
  Miscellaneous construct
QIDAEDGETEYAPRFQG

SEQ ID NO: 430 - protein, 17 aa, Artificial
  Miscellaneous construct
QIDAEDGETEYAPRFQG

SEQ ID NO: 431 - protein, 17 aa, Artificial
  Miscellaneous construct
QIDAEDGETEYAPRFQG

SEQ ID NO: 432 - protein, 7 aa, Artificial
  Miscellaneous construct
STSELAS

SEQ ID NO: 433 - protein, 9 aa, Artificial
  Miscellaneous construct
QQLSHLPLT

SEQ ID NO: 434 - protein, 322 aa, Artificial
  Miscellaneous construct
GPSVFPLAPCSRSTSESTAALGCLVKDYFPEPVTVSWNSGALTSGVHTFPAVLQSSGLYSLSSVVTVPSSSLGTKTYTCNVDHKPSNTKVDKRVESKYGPPCPPCPAPEFLGGPSVFLFPPKPKDTLMISRTPEVTCVVVDVSQEDPEVQFNWYVDGVEVHNAKTKPREEQFNSTYRVVSVLTVLHQDWLNGKEYKCKVSNKGLPSSIEKTISKAKGQPREPQVYTLPPSQEEMTKNQVSLTCLVKGFYPSDIAVEWESNGQPENNYKTTPPVLDSDGSFFLYSRLTVDKSRWQEGNVFSCSVMHEALHNHYTQKSLSLSLG

SEQ ID NO: 435 - DNA, 970 bp, Artificial
  Miscellaneous construct
ggcccatcggtcttcccgctagcgccctgctccaggagcacctccgagagcacagccgccctgggctgcctggtcaaggactacttccccgaaccggtgacggtgtcgtggaactcaggcgccctgaccagcggcgtgcacaccttcccggctgtcctacagtcctcaggactctactccgctcagcagcgtggtgaccgtgccctccagcagcttgggcacgaagacctacacctgcaacgtagatcacaagcccagcaacaccaaggtggacaagagagttgagtccaaatatggtcccccatgcccaccctgcccagcacctgagttcctggggggaccatcagtcttcctgttccccccaaaacccaaggacactctcatgatctcccggacccctgaggtcacgtgcgtggtggtggacgtgagccaggaagaccccgaggtccagttcaactggtacgtggatggcgtggaggtgcataatgccaagacaaagccgcgggaggagcagttcaacagcacgtaccgtgtggtcagcgtcctcaccgtcctgcaccaggactggctgaacggcaaggagtacaagtgcaaggtctccaacaaaggcctcccgtcctccatcgagaaaaccatctccaaagccaaagggcagccccgagagccacaggtgtacaccctgcccccatcccaggaggagatgaccaagaaccaggtcagcctgacctgcctggtcaaaggcttctaccccagcgacatcgccgtggagtgggaaagcaatgggcagccggagaacaactacaagaccacgcctcccgtgctggactccgacggctccttcttcctctacagcaggctaaccgtggacaagagcaggtggcaggaggggaatgtcttctcatgctccgtgatgcatgaggctctgcacaaccactacacacagaagagcctctccctgtctctgggttga

SEQ ID NO: 436 - protein, 444 aa, Artificial
  Miscellaneous construct
EVQLQQSVAELVRPGASVKLSCTASGFNIKSTFMHWVKQRPDQGLEWIGWIDPENGDTEYASKFQGKATMTADTSSNTAYLQLSSLTSEDTAVYYCTTGESNYDFDFWGLGTTLTVSSAKTTPPSVYPLAPGTALKSNSMVTLGCLVKGYFPEPVTVTWNSGALSSGVHTFPAVLQSGLYTLTSSVTVPSSTWPSQTVTCNVAHPASSTKVDKKIVPRNCGGDCKPCICTGSEVSSVFIFPPKPKDVLTITLTPKVTCVVVDISQDDPEVHFSWFVDDVEVHTAQTRPPEEQFNSTFRSVSELPILHQDWLNGRTFRCKVTSAAFPSPIEKTISKPEGRTQVPHVYTMSPTKEEMTQNEVSITCMVKGFYPPDIYVEWQMNGQPQENYKNTPPTMDTDGSYFLYSKLNVKKEKWQQGNTFTCSVLHEGLHNHHTEKSLSHSPGK

SEQ ID NO: 437 - protein, 214 aa, Artificial
  Miscellaneous construct
DIVMTQSHKFMSTSVGDRVSITCKASQDVSTAVAWYQQKPGQSPKLLIYWASTRHTGVPDRFTGSGSGTDYTLTISDVQSEDLADYFCQQYSNYPWTFGGGTKLEIKRADAAPTVSIFPPSTEQLATGGASVVCLMNNFYPRDISVKWKIDGTERRDGVLDSVTDQDSKDSTYSMSSTLSLSKADYESHNLYTCEVVHKTSSSPVVKSFNRNEC

SEQ ID NO: 438 - protein, 450 aa, Artificial
  Miscellaneous construct
EVQLQQSGAEHVKPGASVKLSCTASDFNIKDYYIHWVKQRTAQGLEWIGRIDPEDGETEYAPRFQGKATIIADTSSNTAYLQLSSLTSEDTAVYYCAREGYYYDSRDYWYFDVWGTGTTVTVSSAKTTPPSVYPLAPGTALKSNSMVTLGCLVKGYFPEPVTVTWNSGALSSGVHTFPAVLQSGLYTLTSSVTVPSSTWPSQTVTCNVAHPASSTKVDKKIVPRNCGGDCKPCICTGSEVSSVFIFPPKPKDVLTITLTPKVTCVVVDISQDDPEVHFSWFVDDVEVHTAQTRPPEEQFNSTFRSVSELPILHQDWLNGRTFRCKVTSAAFPSPIEKTISKPEGRTQVPHVYTMSPTKEEMTQNEVSITCMVKGFYPPDIYVEWQMNGQPQENYKNTPPTMDTDGSYFLYSKLNVKKEKWQQGNTFTCSVLHEGLHNHHTEKSLSHSPGK

SEQ ID NO: 439 - protein, 213 aa, Artificial
  Miscellaneous construct
EIVLTQSPALMSASPGEKVTMTCSASSSVSYMHWFQQKPGTSPKLWIYSTSNLASGVPARFSGSGSGTSYSLTISSMEAEDAATYYCQQWSSNPLTFGAGTKLELKRADAAPTVSIFPPSTEQLATGGASVVCLMNNFYPRDISVKWKIDGTERRDGVLDSVTDQDSKDSTYSMSSTLSLSKADYESHNLYTCEVVHKTSSSPVVKSFNRNEC

SEQ ID NO: 440 - protein, 10 aa, Homo sapiens
GFTFSSYVMN

SEQ ID NO: 441 - protein, 10 aa, Homo sapiens
GFTFRSHWLS

SEQ ID NO: 442 - protein, 10 aa, Homo sapiens
GFTFSSYVMN

SEQ ID NO: 443 - protein, 10 aa, Homo sapiens
GFTFRSHWLS

SEQ ID NO: 444 - protein, 10 aa, Homo sapiens
GFTFRSHWLS

SEQ ID NO: 445 - protein, 10 aa, Homo sapiens
GFTFRSHWLS

SEQ ID NO: 446 - protein, 10 aa, Homo sapiens
GFTFRSHWLS

SEQ ID NO: 447 - protein, 10 aa, Homo sapiens
GFTFRSHWLS

SEQ ID NO: 448 - protein, 10 aa, Homo sapiens
GFTFRSHWLS

SEQ ID NO: 449 - protein, 10 aa, Homo sapiens
GFTFRSHWLS

SEQ ID NO: 450 - protein, 10 aa, Homo sapiens
GFTFRSHWLS

SEQ ID NO: 451 - protein, 20 aa, Homo sapiens
WVSFISGDSSNTYYADSVKG

SEQ ID NO: 452 - protein, 20 aa, Homo sapiens
WVSNINYDGSSTYYADSVKG

SEQ ID NO: 453 - protein, 20 aa, Homo sapiens
WVSFISGDSSNTYYADSVKG

SEQ ID NO: 454 - protein, 20 aa, Homo sapiens
WVSNINYDGSSTYYADSVKG

SEQ ID NO: 455 - protein, 19 aa, Homo sapiens
WVSVTGVHGDTYYADSVKG

SEQ ID NO: 456 - protein, 19 aa, Homo sapiens
WVSVIGNWGDTYYADSVKG

SEQ ID NO: 457 - protein, 19 aa, Homo sapiens
WVSVTTHQGYTYYADSVKG

SEQ ID NO: 458 - protein, 19 aa, Homo sapiens
WVSATNRYGYTYYADSVKG

SEQ ID NO: 459 - protein, 20 aa, Homo sapiens
WVSNINYDGSSTYYADSVKG

SEQ ID NO: 460 - protein, 19 aa, Homo sapiens
WVSVITPYGDTYYADSVKG

SEQ ID NO: 461 - protein, 19 aa, Homo sapiens
WVSVITPYGDTYYADSVKG

SEQ ID NO: 462 - protein, 15 aa, Homo sapiens
TFMHGHLGGGLSMDF

SEQ ID NO: 463 - protein, 8 aa, Homo sapiens
DTYLHFDY

SEQ ID NO: 464 - protein, 15 aa, Homo sapiens
TFMHGHLGGGLSMDF

SEQ ID NO: 465 - protein, 8 aa, Homo sapiens
DTYLHFDY

SEQ ID NO: 466 - protein, 8 aa, Homo sapiens
DTYLHFDY

SEQ ID NO: 467 - protein, 8 aa, Homo sapiens
DTYLHFDY

SEQ ID NO: 468 - protein, 8 aa, Homo sapiens
DTYLHFDY

SEQ ID NO: 469 - protein, 8 aa, Homo sapiens
DTYLHFDY

SEQ ID NO: 470 - protein, 8 aa, Homo sapiens
DTYLHFDY

SEQ ID NO: 471 - protein, 8 aa, Homo sapiens
DTYLHFDY

SEQ ID NO: 472 - protein, 8 aa, Homo sapiens
DTYLHFDY

SEQ ID NO: 473 - protein, 11 aa, Homo sapiens
SGDNIGSFYVH

SEQ ID NO: 474 - protein, 20 aa, Homo sapiens
WVSNINYDGSSTYYADSVKG

SEQ ID NO: 475 - protein, 20 aa, Homo sapiens
WVSNINYDGSSTYYADSVKG

SEQ ID NO: 476 - protein, 11 aa, Homo sapiens
SGDNIGSFYVH

SEQ ID NO: 477 - protein, 14 aa, Homo sapiens
TGTSSDVGDINDVS

SEQ ID NO: 478 - protein, 14 aa, Homo sapiens
TGTSSDVGDINDVS

SEQ ID NO: 479 - protein, 14 aa, Homo sapiens
TGTSSDVGDINDVS

SEQ ID NO: 480 - protein, 14 aa, Homo sapiens
TGTSSDVGDINDVS

SEQ ID NO: 481 - protein, 14 aa, Homo sapiens
TGTSSDVGDINDVS

SEQ ID NO: 482 - protein, 14 aa, Homo sapiens
TGTSSDVGDINDVS

SEQ ID NO: 483 - protein, 14 aa, Homo sapiens
TGTSSDVGDINDVS

SEQ ID NO: 484 - protein, 11 aa, Homo sapiens
LVIYDDNNRPS

SEQ ID NO: 485 - protein, 11 aa, Homo sapiens
LMIYDVNNRPS

SEQ ID NO: 486 - protein, 11 aa, Homo sapiens
LVIYDDNNRPS

SEQ ID NO: 487 - protein, 11 aa, Homo sapiens
LMIYDVNNRPS

SEQ ID NO: 488 - protein, 11 aa, Homo sapiens
LMIYDVNNRPS

SEQ ID NO: 489 - protein, 11 aa, Homo sapiens
LMIYDVNNRPS

SEQ ID NO: 490 - protein, 11 aa, Homo sapiens
LMIYDVNNRPS

SEQ ID NO: 491 - protein, 11 aa, Homo sapiens
LMIYDVNNRPS

SEQ ID NO: 492 - protein, 11 aa, Homo sapiens
LMIYDVNNRPS

SEQ ID NO: 493 - protein, 11 aa, Homo sapiens
LMIYDVNNRPS

SEQ ID NO: 494 - protein, 11 aa, Homo sapiens
LMIYDVNNRPS

SEQ ID NO: 495 - protein, 10 aa, Homo sapiens
GSWAGSSGSY

SEQ ID NO: 496 - protein, 10 aa, Homo sapiens
SSYGESLTSY

SEQ ID NO: 497 - protein, 10 aa, Homo sapiens
ASWTGVEPDY

SEQ ID NO: 498 - protein, 10 aa, Homo sapiens
QSYAGSYLSE

SEQ ID NO: 499 - protein, 10 aa, Homo sapiens
SSYGESLTSY

SEQ ID NO: 500 - protein, 10 aa, Homo sapiens
SSYGESLTSY

SEQ ID NO: 501 - protein, 10 aa, Homo sapiens
SSYGESLTSY

SEQ ID NO: 502 - protein, 10 aa, Homo sapiens
SSYGESLTSY

SEQ ID NO: 503 - protein, 10 aa, Homo sapiens
STYDGPGLSE

SEQ ID NO: 504 - protein, 10 aa, Homo sapiens
SSYGESLTSY

SEQ ID NO: 505 - protein, 10 aa, Homo sapiens
SSYGESLTSY

SEQ ID NO: 506 - protein, 124 aa, Homo sapiens
QVQLVESGGGLVQPGGSLRLSCAASGFTFSSYVMNWVRQAPGKGLEWVSFISGDSSNTYYADSVKGRFTISRDNSKNTLYLQMNSLRAEDTAVYYCARTFMHGHLGGGLSMDFWGQGTLVTVSS

SEQ ID NO: 507 - protein, 117 aa, Homo sapiens
QVQLVESGGGLVQPGGSLRLSCAASGFTFRSHWLSWVRQAPGKGLEWVSNINYDGSSTYYADSVKGRFTISRDNSKNTLYLQMNSLRAEDTAVYYCARDTYLHFDYWGQGTLVTVSS

SEQ ID NO: 508 - protein, 124 aa, Homo sapiens; identical to SEQ ID NO: 506

SEQ ID NO: 509 - protein, 117 aa, Homo sapiens; identical to SEQ ID NO: 507

SEQ ID NO: 510 - protein, 116 aa, Homo sapiens
QVQLVESGGGLVQPGGSLRLSCAASGFTFRSHWLSWVRQAPGKGLEWVSVTGVHGDTYYADSVKGRFTISRDNSKNTLYLQMNSLRAEDTAVYYCARDTYLHFDYWGQGTLVTVSS

SEQ ID NO: 511 - protein, 116 aa, Homo sapiens
QVQLVESGGGLVQPGGSLRLSCAASGFTFRSHWLSWVRQAPGKGLEWVSVIGNWGDTYYADSVKGRFTISRDNSKNTLYLQMNSLRAEDTAVYYCARDTYLHFDYWGQGTLVTVSS

SEQ ID NO: 512 - protein, 116 aa, Homo sapiens
QVQLVESGGGLVQPGGSLRLSCAASGFTFRSHWLSWVRQAPGKGLEWVSVTTHQGYTYYADSVKGRFTISRDNSKNTLYLQMNSLRAEDTAVYYCARDTYLHFDYWGQGTLVTVSS

SEQ ID NO: 513 - protein, 116 aa, Homo sapiens
QVQLVESGGGLVQPGGSLRLSCAASGFTFRSHWLSWVRQAPGKGLEWVSATNRYGYTYYADSVKGRFTISRDNSKNTLYLQMNSLRAEDTAVYYCARDTYLHFDYWGQGTLVTVSS

SEQ ID NO: 514 - protein, 117 aa, Homo sapiens; identical to SEQ ID NO: 507

SEQ ID NO: 515 - protein, 116 aa, Homo sapiens
QVQLVESGGGLVQPGGSLRLSCAASGFTFRSHWLSWVRQAPGKGLEWVSVITPYGDTYYADSVKGRFTISRDNSKNTLYLQMNSLRAEDTAVYYCARDTYLHFDYWGQGTLVTVSS

SEQ ID NO: 516 - protein, 116 aa, Homo sapiens; identical to SEQ ID NO: 515

SEQ ID NO: 517 - protein, 110 aa, Homo sapiens
DIELTQPPSVSVAPGQTARISCSGDNIGSFYVHWYQQKPGQAPVLVIYDDNNRPSGIPERFSGSNSGNTATLTISGTQAEDEADYYCGSWAGSSGSYVFGGRTKLTVLGQ

SEQ ID NO: 518 - protein, 113 aa, Homo sapiens
DIALTQPASVSGSPGQSITISCTGTSSDVGDINDVSWYQQHPGKAPKLMIYDVNNRPSGVSNRFSGSKSGNTASLTISGLQAEDEADYYCSSYGESLTSYVFGGGTKLTVLGQ

SEQ ID NO: 519 - protein, 110 aa, Homo sapiens
DIELTQPPSVSVAPGQTARISCSGDNIGSFYVHWYQQKPGQAPVLVIYDDNNRPSGIPERFSGSNSGNTATLTISGTQAEDEADYYCASWTGVEPDYVFGGGTKLTVLGQ

SEQ ID NO: 520 - protein, 113 aa, Homo sapiens
DIALTQPASVSGSPGQSITISCTGTSSDVGDINDVSWYQQHPGKAPKLMIYDVNNRPSGVSNRFSGSKSGNTASLTISGLQAEDEADYYCQSYAGSYLSEVFGGGTKLTVLGQ

SEQ ID NO: 521 - protein, 113 aa, Homo sapiens; identical to SEQ ID NO: 518

SEQ ID NO: 522 - protein, 113 aa, Homo sapiens; identical to SEQ ID NO: 518

SEQ ID NO: 523 - protein, 113 aa, Homo sapiens; identical to SEQ ID NO: 518

SEQ ID NO: 524 - protein, 113 aa, Homo sapiens; identical to SEQ ID NO: 518

SEQ ID NO: 525 - protein, 113 aa, Homo sapiens
DIALTQPASVSGSPGQSITISCTGTSSDVGDINDVSWYQQHPGKAPKLMIYDVNNRPSGVSNRFSGSKSGNTASLTISGLQAEDEADYYCSTYDGPGLSEVFGGGTKLTVLGQ

SEQ ID NO: 526 - protein, 113 aa, Homo sapiens; identical to SEQ ID NO: 518

SEQ ID NO: 527 - protein, 113 aa, Homo sapiens; identical to SEQ ID NO: 525

SEQ ID NO: 528 - DNA, 372 bp, Homo sapiens
caggtgcaattggtggaaagcggcggcggcctggtgcaaccgggcggcagcctgcgtctgagctgcgcggcctccggatttaccttttcttcttatgttatgaattgggtgcgccaagcccctgggaagggtctcgagtgggtgagctttatctctggtgattctagcaatacctattatgcggatagcgtgaaaggccgttttaccatttcacgtgataattcgaaaaacaccctgtatctgcaaatgaacagcctgcgtgcggaagatacggccgtgtattattgcgcgcgtacttttatgcatggtcatcttggtggtggtctttctatggatttttggggccaaggcaccctggtgacggttagctca

SEQ ID NO: 529 - DNA, 350 bp, Homo sapiens
caggtgcaattggtggaaagcggcggcggcctggtgcaaccgggcggcagcctgcgtctagctgcgcggcctccggatttacctttcgttctcattggctttcttgggtgcgccaagcccctgggaagggtctcgagtgggtgagcaatatcaattatgatggtagctctacctattatgcggatagcgtgaaaggccgttttaccatttcacgtgataattcgaaaaacaccctgtatctgcaaatgaacagcctgcgtgcggaagatacggccgtgtattattgcgcgcgtgatacttatcttcattttgattattggggccaaggcaccctggtgacggttagctca

SEQ ID NO: 530 - DNA, 372 bp, Homo sapiens; identical to SEQ ID NO: 528

SEQ ID NO: 531 - DNA, 351 bp, Homo sapiens
caggtgcaattggtggaaagcggcggcggcctggtgcaaccgggcggcagcctgcgtctgagctgcgcggcctccggatttacctttcgttctcattggctttcttgggtgcgccaagcccctgggaagggtctcgagtgggtgagcaatatcaattatgatggtagctctacctattatgcggatagcgtgaaaggccgttttaccatttcacgtgataattcgaaaaacaccctgtatctgcaaatgaacagcctgcgtgcggaagatacggccgtgtattattgcgcgcgtgatacttatcttcattttgattattggggccaaggcaccctggtgacggttagctca

SEQ ID NO: 532 - DNA, 348 bp, Homo sapiens
caggtgcaattggtggaaagcggcggcggcctggtgcaaccgggcggcagcctgcgtctgagctgcgcggcctccggatttacctttcgttctcattggctttcttgggtgcgccaagcccctgggaagggtctcgagtgggtgagcgttactggtgttcatggtgatacttattatgctgattctgttaagggtcgttttaccatttcacgtgataattcgaaaaacaccctgtatctgcaaatgaacagcctgcgtgcggaagatacggccgtgtattattgcgcgcgtgatacttatcttcattttgattattggggccaaggcaccctggtgacggttagctca

SEQ ID NO: 533 - DNA, 348 bp, Homo sapiens
caggtgcaattggtggaaagcggcggcggcctggtgcaaccgggcggcagcctgcgtctgagctgcgcggcctccggatttacctttcgttctcattggctttcttgggtgcgccaagcccctgggaagggtctcgagtgggtgagcgttattggtaattggggtgatacttattatgctgattctgttaagggtcgttttaccatttcacgtgataattcgaaaaacaccctgtatctgcaaatgaacagcctgcgtgcggaagatacggccgtgtattattgcgcgcgtgatacttatcttcattttgattattggggccaaggcaccctggtgacggttagctca

SEQ ID NO: 534 - DNA, 348 bp, Homo sapiens
caggtgcaattggtggaaagcggcggcggcctggtgcaaccgggcggcagcctgcgtctgagctgcgcggcctccggatttacctttcgttctcattggctttcttgggtgcgccaagcccctgggaagggtctcgagtgggtgagcgttactactcatcagggttatacttattatgctgattctgttaagggtcgttttaccatttcacgtgataattcgaaaaacaccctgtatctgcaaatgaacagcctgcgtgcggaagatacggccgtgtattattgcgcgcgtgatacttatcttcattttgattattggggccaaggcaccctggtgacggttagctca

SEQ ID NO: 535 - DNA, 348 bp, Homo sapiens
caggtgcaattggtggaaagcggcggcggcctggtgcaaccgggcggcagcctgcgtctgagctgcgcggcctccggatttacctttcgttctcattggctttcttgggtgcgccaagcccctgggaagggtctcgagtgggtgagcgctactaatcgttatggttatacttattatgctgattctgttaagggtcgttttaccatttcacgtgataattcgaaaaacaccctgtatctgcaaatgaacagcctgcgtgcggaagatacggccgtgtattattgcgcgcgtgatacttatcttcattttgattattggggccaaggcaccctggtgacggttagctca

SEQ ID NO: 536 - DNA, 351 bp, Homo sapiens; identical to SEQ ID NO: 531

SEQ ID NO: 537 - DNA, 348 bp, Homo sapiens
caggtgcaattggtggaaagcggcggcggcctggtgcaaccgggcggcagcctgcgtctgagctgcgcggcctccggatttacctttcgttctcattggctttcttgggtgcgccaagcccctgggaagggtctcgagtgggtgagcgttattactccttatggtgatacttattatgctgattctgttaagggtcgttttaccatttcacgtgataattcgaaaaacaccctgtatctgcaaatgaacagcctgcgtgcggaagatacggccgtgtattattgcgcgcgtgatacttatcttcattttgattattggggccaaggcaccctggtgacggttagctca

SEQ ID NO: 538 - DNA, 348 bp, Homo sapiens; identical to SEQ ID NO: 537

SEQ ID NO: 539 - DNA, 330 bp, Homo sapiens
gatatcgaactgacccagccgccttcagtgagcgttgcaccaggtcagaccgcgcgtatctcgtgtagcggcgataatattggttctttttatgttcattggtaccagcagaaacccgggcaggcgccagttcttgtgatttatgatgataataatcgtccctcaggcatcccggaacgctttagcggatccaacagcggcaacaccgcgaccctgaccattagcggcactcaggcggaagacgaagcggattattattgcggttcttgggctggttcttctggttcttatgtgtttggcggccgcacgaagttaaccgttcttggccag

SEQ ID NO: 540 - DNA, 339 bp, Homo sapiens
gatatcgcactgacccagccagcttcagtgagcggctcaccaggtcagagcattaccatctcgtgtacgggtactagcagcgatgttggtgatattaatgatgtgtcttggtaccagcagcatcccgggaaggcgccgaaacttatgatttatgatgttaataatcgtccctcaggcgtgagcaaccgttttagcggatccaaaagcggcaacaccgcgagcctgaccattagcggcctgcaagcggaagacgaagcggattattattgctcttcttatggtgagtctcttacttcttatgtgtttggcggcggcacgaagttaaccgttcttggccag

SEQ ID NO: 541 - DNA, 330 bp, Homo sapiens
gatatcgaactgacccagccgccttcagtgagcgttgcaccaggtcagaccgcgcgtatctcgtgtagcggcgataatattggttctttttatgttcattggtaccagcagaaacccgggcaggcgccagttcttgtgatttatgatgataataatcgtccctcaggcatcccggaacgctttagcggatccaacagcggcaacaccgcgaccctgaccattagcggcactcaggcggaagacgaagcggattattattgcgcttcttggactggtgttgagcctgattatgtgtttggcggcggcacgaagttaaccgttcttggccag

SEQ ID NO: 542 - DNA, 339 bp, Homo sapiens
gatatcgcactgacccagccagcttcagtgagcggctcaccaggtcagagcattaccatctcgtgtacgggtactagcagcgatgttggtgatattaatgatgtgtcttggtaccagcagcatcccgggaaggcgccgaaacttatgatttatgatgttaataatcgtccctcaggcgtgagcaaccgttttagcggatccaaaagcggcaacaccgcgagcctgaccattagcggcctgcaagcggaagacgaagcggattattattgccagtcttatgctggttcttatctttctgaggtgtttggcggcggcacgaagttaaccgttcttggccag

SEQ ID NO: 543 - DNA, 339 bp, Homo sapiens; identical to SEQ ID NO: 540

SEQ ID NO: 544 - DNA, 339 bp, Homo sapiens; identical to SEQ ID NO: 540

SEQ ID NO: 545 - DNA, 339 bp, Homo sapiens; identical to SEQ ID NO: 540

SEQ ID NO: 546 - DNA, 339 bp, Homo sapiens; identical to SEQ ID NO: 540

SEQ ID NO: 547 - DNA, 339 bp, Homo sapiens
gatatcgcactgacccagccagcttcagtgagcggctcaccaggtcagagcattaccatctcgtgtacgggtactagcagcgatgttggtgatattaatgatgtgtcttggtaccagcagcatcccgggaaggcgccgaaacttatgatttatgatgttaataatcgtccctcaggcgtgagcaaccgttttagcggatccaaaagcggcaacaccgcgagcctgaccattagcggcctgcaagcggaagacgaagcggattattattgctctacttatgatggtcctggtctttctgaggtgtttggcggcggcacgaagttaaccgttcttggccag

SEQ ID NO: 548 - DNA, 339 bp, Homo sapiens; identical to SEQ ID NO: 540

SEQ ID NO: 549 - DNA, 339 bp, Homo sapiens; identical to SEQ ID NO: 547

SEQ ID NO: 550 - protein, 469 aa, Homo sapiens
MAWVWTLPFLMAAAQSVQAQVQLVESGGGLVQPGGSLRLSCAASGFTFSSYVMNWVRQAPGKGLEWVSFISGDSSNTYYADSVKGRFTISRDNSKNTLYLQMNSLRAEDTAVYYCARTFMHGHLGGGLSMDFWGQGTLVTVSSASTKGPSVFPLAPCSRSTSESTAALGCLVKDYFPEPVTVSWNSGALTSGVHTFPAVLQSSGLYSLSSVVTVPSSNFGTQTYTCNVDHKPSNTKVDKTVERKCCVECPPCPAPPVAGPSVFLFPPKPKDTLMISRTPEVTCVVVDVSHEDPEVQFNWYVDGVEVHNAKTKPREEQFNSTFRVVSVLTVVHQDWLNGKEYKCKVSNKGLPAPIEKTISKTKGQPREPQVYTLPPSREEMTKNQVSLTCLVKGFYPSDIAVEWESNGQPENNYKTTPPMLDSDGSFFLYSKLTVDKSRWQQGNVFSCSVMHEALHNHYTQKSLSLSPGK

SEQ ID NO: 551 - protein, 462 aa, Homo sapiens
MAWVWTLPFLMAAAQSVQAQVQLVESGGGLVQPGGSLRLSCAASGFTFRSHWLSWVRQAPGKGLEWVSNINYDGSSTYYADSVKGRFTISRDNSKNTLYLQMNSLRAEDTAVYYCARDTYLHFDYWGQGTLVTVSSASTKGPSVFPLAPCSRSTSESTAALGCLVKDYFPEPVTVSWNSGALTSGVHTFPAVLQSSGLYSLSSVVTVPSSNFGTQTYTCNVDHKPSNTKVDKTVERKCCVECPPCPAPPVAGPSVFLFPPKPKDTLMISRTPEVTCVVVDVSHEDPEVQFNWYVDGVEVHNAKTKPREEQFNSTFRVVSVLTVVHQDWLNGKEYKCKVSNKGLPAPIEKTISKTKGQPREPQVYTLPPSREEMTKNQVSLTCLVKGFYPSDIAVEWESNGQPENNYKTTPPMLDSDGSFFLYSKLTVDKSRWQQGNVFSCSVMHEALHNHYTQKSLSLSPGK

SEQ ID NO: 552 - protein, 469 aa, Homo sapiens; identical to SEQ ID NO: 550

SEQ ID NO: 553 - protein, 462 aa, Homo sapiens; identical to SEQ ID NO: 551

SEQ ID NO: 554 - protein, 461 aa, Homo sapiens
MAWVWTLPFLMAAAQSVQAQVQLVESGGGLVQPGGSLRLSCAASGFTFRSHWLSWVRQAPGKGLEWVSVTGVHGDTYYADSVKGRFTISRDNSKNTLYLQMNSLRAEDTAVYYCARDTYLHFDYWGQGTLVTVSSASTKGPSVFPLAPCSRSTSESTAALGCLVKDYFPEPVTVSWNSGALTSGVHTFPAVLQSSGLYSLSSVVTVPSSNFGTQTYTCNVDHKPSNTKVDKTVERKCCVECPPCPAPPVAGPSVFLFPPKPKDTLMISRTPEVTCVVVDVSHEDPEVQFNWYVDGVEVHNAKTKPREEQFNSTFRVVSVLTVVHQDWLNGKEYKCKVSNKGLPAPIEKTISKTKGQPREPQVYTLPPSREEMTKNQVSLTCLVKGFYPSDIAVEWESNGQPENNYKTTPPMLDSDGSFFLYSKLTVDKSRWQQGNVFSCSVMHEALHNHYTQKSLSLSPGK

SEQ ID NO: 555 - protein, 461 aa, Homo sapiens
MAWVWTLPFLMAAAQSVQAQVQLVESGGGLVQPGGSLRLSCAASGFTFRSHWLSWVRQAPGKGLEWVSVIGNWGDTYYADSVKGRFTISRDNSKNTLYLQMNSLRAEDTAVYYCARDTYLHFDYWGQGTLVTVSSASTKGPSVFPLAPCSRSTSESTAALGCLVKDYFPEPVTVSWNSGALTSGVHTFPAVLQSSGLYSLSSVVTVPSSNFGTQTYTCNVDHKPSNTKVDKTVERKCCVECPPCPAPPVAGPSVFLFPPKPKDTLMISRTPEVTCVVVDVSHEDPEVQFNWYVDGVEVHNAKTKPREEQFNSTFRVVSVLTVVHQDWLNGKEYKCKVSNKGLPAPIEKTISKTKGQPREPQVYTLPPSREEMTKNQVSLTCLVKGFYPSDIAVEWESNGQPENNYKTTPPMLDSDGSFFLYSKLTVDKSRWQQGNVFSCSVMHEALHNHYTQKSLSLSPGK

SEQ ID NO: 556 - protein, 461 aa, Homo sapiens
MAWVWTLPFLMAAAQSVQAQVQLVESGGGLVQPGGSLRLSCAASGFTFRSHWLSWVRQAPGKGLEWVSVTTHQGYTYYADSVKGRFTISRDNSKNTLYLQMNSLRAEDTAVYYCARDTYLHFDYWGQGTLVTVSSASTKGPSVFPLAPCSRSTSESTAALGCLVKDYFPEPVTVSWNSGALTSGVHTFPAVLQSSGLYSLSSVVTVPSSNFGTQTYTCNVDHKPSNTKVDKTVERKCCVECPPCPAPPVAGPSVFLFPPKPKDTLMISRTPEVTCVVVDVSHEDPEVQFNWYVDGVEVHNAKTKPREEQFNSTFRVVSVLTVVHQDWLNGKEYKCKVSNKGLPAPIEKTISKTKGQPREPQVYTLPPSREEMTKNQVSLTCLVKGFYPSDIAVEWESNGQPENNYKTTPPMLDSDGSFFLYSKLTVDKSRWQQGNVFSCSVMHEALHNHYTQKSLSLSPGK

SEQ ID NO: 557 - protein, 465 aa, Homo sapiens
MKHLWFFLLLVAAPRWVLSQVQLVESGGGLVQPGGSLRLSCAASGFTFRSHWLSWVRQAPGKGLEWVSATNRYGYTYYADSVKGRFTISRDNSKNTLYLQMNSLRAEDTAVYYCARDTYLHFDYWGQGTLVTVSSAKTTAPSVYPLAPVCGDTTGSSVTLGCLVKGYFPEPVTLTWNSGSLSSGVHTFPAVLQSDLYTLSSSVTVTSSTWPSQSITCNVAHPASSTKVDKKIEPRGPTIKPCPPCKCPAPNLLGGPSVFIFPPKIKDVLMISLSPIVTCVVVDVSEDDPDVQISWFVNNVEVHTAQTQTHREDYNSTLRVVSALPIQHQDWMSGKEFKCKVNNKDLPAPIERTISKPKGSVRAPQVYVLPPPEEEMTKKQVTLTCMVTDFMPEDIYVEWTNNGKTELNYKNTEPVLDSDGSYFMYSKLRVEKKNWVERNSYSCSVVHEGLHNHHTTKSFSRTPGK

SEQ ID NO: 558 - protein, 462 aa, Homo sapiens; identical to SEQ ID NO: 551

SEQ ID NO: 559 - protein, 461 aa, Homo sapiens
MAWVWTLPFLMAAAQSVQAQVQLVESGGGLVQPGGSLRLSCAASGFTFRSHWLSWVRQAPGKGLEWVSVITPYGDTYYADSVKGRFTISRDNSKNTLYLQMNSLRAEDTAVYYCARDTYLHFDYWGQGTLVTVSSASTKGPSVFPLAPCSRSTSESTAALGCLVKDYFPEPVTVSWNSGALTSGVHTFPAVLQSSGLYSLSSVVTVPSSNFGTQTYTCNVDHKPSNTKVDKTVERKCCVECPPCPAPPVAGPSVFLFPPKPKDTLMISRTPEVTCVVVDVSHEDPEVQFNWYVDGVEVHNAKTKPREEQFNSTFRVVSVLTVVHQDWLNGKEYKCKVSNKGLPAPIEKTISKTKGQPREPQVYTLPPSREEMTKNQVSLTCLVKGFYPSDIAVEWESNGQPENNYKTTPPMLDSDGSFFLYSKLTVDKSRWQQGNVFSCSVMHEALHNHYTQKSLSLSPGK

SEQ ID NO: 560 - protein, 461 aa, Homo sapiens; identical to SEQ ID NO: 559

SEQ ID NO: 561 - protein, 130 aa, Homo sapiens
MSVLTQVLALLLLWLTGTRCDIELTQPPSVSVAPGQTARISCSGDNIGSFYVHWYQQKPGQAPVLVIYDDNNRPSGIPERFSGSNSGNTATLTISGTQAEDEADYYCGSWAGSSGSYVFGGRTKLTVLGQ

SEQ ID NO: 562 - protein, 237 aa, Homo sapiens
MSVLTQVLALLLLWLTGTRCDIALTQPASVSGSPGQSITISCTGTSSDVGDINDVSWYQQHPGKAPKLMIYDVNNRPSGVSNRFSGSKSGNTASLTISGLQAEDEADYYCSSYGESLTSYVFGGGTKLTVLGQPKAAPSVTLFPPSSEELQANKATLVCLISDFYPGAVTVAWKADSSPVKAGVETTTPSKQSNNKYAASSYLSLTPEQWKSHRSYSCQVTHEGSTVEKTVAPTECS

SEQ ID NO: 563 - protein, 234 aa, Homo sapiens
MSVLTQVLALLLLWLTGTRCDIELTQPPSVSVAPGQTARISCSGDNIGSFYVHWYQQKPGQAPVLVIYDDNNRPSGIPERFSGSNSGNTATLTISGTQAEDEADYYCASWTGVEPDYVFGGGTKLTVLGQPKAAPSVTLFPPSSEELQANKATLVCLISDFYPGAVTVAWKADSSPVKAGVETTTPSKQSNNKYAASSYLSLTPEQWKSHRSYSCQVTHEGSTVEKTVAPTECS

SEQ ID NO: 564 - protein, 237 aa, Homo sapiens
MSVLTQVLALLLLWLTGTRCDIALTQPASVSGSPGQSITISCTGTSSDVGDINDVSWYQQHPGKAPKLMIYDVNNRPSGVSNRFSGSKSGNTASLTISGLQAEDEADYYCQSYAGSYLSEVFGGGTKLTVLGQPKAAPSVTLFPPSSEELQANKATLVCLISDFYPGAVTVAWKADSSPVKAGVETTTPSKQSNNKYAASSYLSLTPEQWKSHRSYSCQVTHEGSTVEKTVAPTECS

SEQ ID NO: 565 - protein, 237 aa, Homo sapiens; identical to SEQ ID NO: 562

SEQ ID NO: 566 - protein, 237 aa, Homo sapiens; identical to SEQ ID NO: 562

SEQ ID NO: 567 - protein, 237 aa, Homo sapiens; identical to SEQ ID NO: 562

SEQ ID NO: 568 - protein, 237 aa, Homo sapiens; identical to SEQ ID NO: 562

SEQ ID NO: 569 - protein, 237 aa, Homo sapiens
MSVLTQVLALLLLWLTGTRCDIALTQPASVSGSPGQSITISCTGTSSDVGDINDVSWYQQHPGKAPKLMIYDVNNRPSGVSNRFSGSKSGNTASLTISGLQAEDEADYYCSTYDGPGLSEVFGGGTKLTVLGQPKAAPSVTLFPPSSEELQANKATLVCLISDFYPGAVTVAWKADSSPVKAGVETTTPSKQSNNKYAASSYLSLTPEQWKSHRSYSCQVTHEGSTVEKTVAPTECS

SEQ ID NO: 570 - protein, 237 aa, Homo sapiens; identical to SEQ ID NO: 562

SEQ ID NO: 571 - protein, 237 aa, Homo sapiens; identical to SEQ ID NO: 569

SEQ ID NO: 572 - DNA, 1410 bp, Homo sapiens
atggcttgggtgtggaccttgccattcctgatggcagctgcccaaagcgtgcaggcccaggtgcagctggtcgagtctggcggcggactggtgcagcctggcggcagcctgagactgagctgcgccgccagcggcttcaccttcagcagctacgtgatgaactgggtgcggcaggcccctggcaagggcctggagtgggtgtccttcatcagcggcgacagcagcaacacctactacgccgacagcgtgaagggccggttcaccatcagccgggacaacagcaagaacaccctgtacctgcagatgaacagcctgcgggccgaggacaccgccgtgtactactgcgcccggaccttcatgcacggccacctgggcggaggactgagcatggatttctggggccagggcaccctggtcaccgtctcctcagcttccaccaagggcccatccgtcttccccctggcgccctgctccaggagcacctccgagagcacagcggccctgggctgcctggtcaaggactacttccccgaaccggtgacggtgtcgtggaactcaggcgctctgaccagcggcgtgcacaccttcccagctgtcctacagtcctcaggactctactccctcagcagcgtggtgacagtgccctccagcaacttcggcacccagacctacacctgcaacgtagatcacaagcccagcaacaccaaggtggacaagacagttgagcgcaaatgttgtgtcgagtgcccaccgtgcccagcaccacctgtggcaggaccgtcagtcttcctcttccccccaaaacccaaggacaccctcatgatctcccggacccctgaggtcacgtgcgtggtggtggacgtgagccacgaagaccccgaggtccagttcaactggtacgtggacggcgtggaggtgcataatgccaagacaaagccacgggaggagcagttcaacagcacgttccgtgtggtcagcgtcctcaccgttgtgcaccaggactggctgaacggcaaggagtacaagtgcaaggtctccaacaaaggcctcccagcccccatcgagaaaaccatctccaaaaccaaagggcagccccgagaaccacaggtgtacaccctgcccccatcccgggaggagatgaccaagaaccaggtcagcctgacctgcctggtcaaaggcttctaccccagcgacatcgccgtggagtgggagagcaatgggcagccggagaacaactacaagaccacacctcccatgctggactccgacggctccttcttcctctacagcaagctcaccgtggacaagagcaggtggcagcaggggaacgtcttctcatgctccgtgatgcatgaggctctgcacaaccactacacgcagaagagcctctccctgtctccgggtaaatga

SEQ ID NO: 573 - DNA, 1389 bp, Homo sapiens
atggcttgggtgtggaccttgccattcctgatggcagctgcccaaggtgtccaggcccaggtgcagctggtcgagagcggcggagggctggtgcagcctggcggcagcctgagactgagctgcgccgccagcggcttcaccttcagaagccactggctgtcctgggtgcggcaggcccctggcaagggcctggaatgggtgtccaacatcaactacgacggcagcagcacctactacgccgacagcgtgaagggccggttcaccatcagccgggacaacagcaagaacaccctgtacctgcagatgaacagcctgcgggccgaggacaccgccgtgtactactgcgccagggacacctacctgcacttcgactactggggccagggcaccctggtcaccgtctcctcagcttccaccaagggcccatccgtcttccccctggcgccctgctccaggagcacctccgagagcacagcggccctgggctgcctggtcaaggactacttccccgaaccggtgacggtgtcgtggaactcaggcgctctgaccagcggcgtgcacaccttcccagctgtcctacagtcctcaggactctactccctcagcagcgtggtgacagtgccctccagcaacttcggcacccagacctacacctgcaacgtagatcacaagcccagcaacaccaaggtggacaagacagttgagcgcaaatgttgtgtcgagtgcccaccgtgcccagcaccacctgtggcaggaccgtcagtcttcctcttccccccaaaacccaaggacaccctcatgatctcccggacccctgaggtcacgtgcgtggtggtggacgtgagccacgaagaccccgaggtccagttcaactggtacgtggacggcgtggaggtgcataatgccaagacaaagccacgggaggagcagttcaacagcacgttccgtgtggtcagcgtcctcaccgttgtgcaccaggactggctgaacggcaaggagtacaagtgcaaggtctccaacaaaggcctcccagcccccatcgagaaaaccatctccaaaaccaaagggcagccccgagaaccacaggtgtacaccctgcccccatcccgggaggagatgaccaagaaccaggtcagcctgacctgcctggtcaaaggcttctaccccagcgacatcgccgtggagtgggagagcaatgggcagccggagaacaactacaagaccacacctcccatgctggactccgacggctccttcttcctctacagcaagctcaccgtggacaagagcaggtggcagcaggggaacgtcttctcatgctccgtgatgcatgaggctctgcacaaccactacacgcagaagagcctctccctgtctccgggtaaatga

SEQ ID NO: 574 - DNA, 1410 bp, Homo sapiens; identical to SEQ ID NO: 572

SEQ ID NO: 575 - DNA, 1389 bp, Homo sapiens
atggcttgggtgtggaccttgccattcctgatggcagctgcccaaggtgtccaggcccaggtgcagctggtcgagagcggcggagggctggtgcagcctggcggcagcctgagactgagctgcgccgccagcggcttcaccttcagaagccactggctgtcctgggtgcggcaggcccctggcaagggcctggaatgggtgtccaacatcaactacgacggcagcagcacctactacgccgacagcgtgaagggccggttcaccatcagccgggacaacagcaagaacaccctgtacctgcagatgaacagcctgcgggccgaggacaccgccgtgtactactgcgccagggacacctacctgcacttcgactactggggccagggcaccctggtcaccgtctcctcagcttccaccaagggcccatccgtcttccccctggcgccctgctccaggagcacctccgagagcacagcggccctgggctgcctggtcaaggactacttccccgaaccggtgacggtgtcgtggaactcaggcgctctgaccagcggcgtgcacaccttcccagctgtcctacagtcctcaggactctactccctcagcagcgtggtgacagtgccctccagcaacttcggcacccagacctacacctgcaacgtagatcacaagcccagcaacaccaaggtggacaagacagttgagcgcaaatgttgtgtcgagtgcccaccgtgcccagcaccacctgtggcaggaccgtcagtcttcctcttccccccaaaacccaaggacaccctcatgatctcccggacccctgaggtcacgtgcgtggtggtggacgtgagccacgaagaccccgaggtccagttcaactggtacgtggacggcgtggaggtgcataatgccaagacaaagccacgggaggagcagttcaacagcacgttccgtgtggtcagcgtcctcaccgttgtgcaccaggactggctgaacggcaaggagtacaagtgcaaggtctccaacaaaggcctcccagcccccatcgagaaaaccatctccaaaaccaaagggcagccccgagaaccacaggtgtacaccctgcccccatcccgggaggagatgaccaagaaccaggtcagcctgacctgcctggtcaaaggcttctaccccagagacatcgccgtggagtgggagagcaatgggcagccggagaacaactacaagaccacacctcccatgctggactccgacggctccttcttcctctacagcaagctcaccgtggacaagagcaggtggcagcaggggaacgtcttctcatgctccgtgatgcatgaggctctgcacaaccactacacgcagaagagcctctccctgtctccgggtaaatga

SEQ ID NO: 576 - DNA, 1386 bp, Homo sapiens
atggcttgggtgtggaccttgccattcctgatggcagctgcccaaagtgtccaggcccaggtgcagctggtcgagagcggcggagggctggtgcagcctggcggcagcctgagactgagctgcgccgccagcggcttcaccttcagaagccactggctgtcctgggtgcggcaggcccctggcaagggcctggaatgggtgtccgtgaccggcgtgcacggcgacacctactacgccgacagcgtgaagggccggttcaccatcagccgggacaacagcaagaacaccctgtacctgcagatgaacagcctgcgggccgaggacaccgccgtgtactactgcgccagggacacctacctgcacttcgactactggggccagggcaccctggtcaccgtctcctcagcttccaccaagggcccatccgtcttccccctggcgccctgctccaggagcacctccgagagcacagcggccctgggctgcctggtcaaggactacttccccgaaccggtgacggtgtcgtggaactcaggcgctctgaccagcggcgtgcacaccttcccagctgtcctacagtcctcaggactctactccctcagcagcgtggtgacagtgccctccagcaacttcggcacccagacctacacctgcaacgtagatcacaagcccagcaacaccaaggtggacaagacagttgagcgcaaatgttgtgtcgagtgcccaccgtgcccagcaccacctgtggcaggaccgtcagtcttcctcttccccccaaaacccaaggacaccctcatgatctcccggacccctgaggtcacgtgcgtggtggtggacgtgagccacgaagaccccgaggtccagttcaactggtacgtggacggcgtggaggtgcataatgccaagacaaagccacgggaggagcagttcaacagcacgttccgtgtggtcagcgtcctcaccgttgtgcaccaggactggctgaacggcaaggagtacaagtgcaaggtctccaacaaaggcctcccagcccccatcgagaaaaccatctccaaaaccaaagggcagccccgagaaccacaggtgtacaccctgcccccatcccgggaggagatgaccaagaaccaggtcagcctgacctgcctggtcaaaggcttctaccccagcgacatcgccgtggagtgggagagcaatgggcagccggagaacaactacaagaccacacctcccatgctggactccgacggctccttcttcctctacagcaagctcaccgtggacaagagcaggtggcagcaggggaacgtcttctcatgctccgtgatgcatgaggctctgcacaaccactacacgcagaagagcctctccctgtctccgggtaaatga

SEQ ID NO: 577 - DNA, 1386 bp, Homo sapiens
atggcttgggtgtggaccttgccattcctgatggcagctgcccaaagtgtccaggcccaggtgcagctggtcgagagcggcggagggctggtgcagcctggcggcagcctgagactgagctgcgccgccagcggcttcaccttcagaagccactggctgtcctgggtgcggcaggcccctggcaagggcctggaatgggtgtccgtgatcggcaactggggcgacacctactacgccgacagcgtgaagggccggttcaccatcagccgggacaacagcaagaacaccctgtacctgcagatgaacagcctgcgggccgaggacaccgccgtgtactactgcgccagggacacctacctgcacttcgactactggggccagggcaccctggtcaccgtctcctcagcttccaccaagggcccatccgtcttccccctggcgccctgctccaggagcacctccgagagcacagcggccctgggctgcctggtcaaggactacttccccgaaccggtgacggtgtcgtggaactcaggcgctctgaccagcggcgtgcacaccttcccagctgtcctacagtcctcaggactctactccctcagcagcgtggtgacagtgccctccagcaacttcggcacccagacctacacctgcaacgtagatcacaagcccagcaacaccaaggtggacaagacagttgagcgcaaatgttgtgtcgagtgcccaccgtgcccagcaccacctgtggcaggaccgtcagtcttcctcttccccccaaaacccaaggacaccctcatgatctcccggacccctgaggtcacgtgcgtggtggtggacgtgagccacgaagaccccgaggtccagttcaactggtacgtggacggcgtggaggtgcataatgccaagacaaagccacgggaggagcagttcaacagcacgttccgtgtggtcagcgtcctcaccgttgtgcaccaggactggctgaacggcaaggagtacaagtgcaaggtctccaacaaaggcctcccagcccccatcgagaaaaccatctccaaaaccaaagggcagccccgagaaccacaggtgtacaccctgcccccatcccgggaggagatgaccaagaaccaggtcagcctgacctgcctggtcaaaggcttctaccccagcgacatcgccgtggagtgggagagcaatgggcagccggagaacaactacaagaccacacctcccatgctggactccgacggctccttcttcctctacagcaagctcaccgtggacaagagcaggtggcagcaggggaacgtcttctcatgctccgtgatgcatgaggctctgcacaaccactacacgcagaagagcctctccctgtctccgggtaaatga

SEQ ID NO: 578 - DNA, 1386 bp, Homo sapiens
atggcttgggtgtggaccttgccattcctgatggcagctgcccaaagtgtccaggcccaggtgcagctggtcgagagcggcggagggctggtgcagcctggcggcagcctgagactgagctgcgccgccagcggcttcaccttcagaagccactggctgtcctgggtgcggcaggcccctggcaagggcctggaatgggtgtccgtgaccacccaccagggctacacctactacgccgacagcgtgaagggccggttcaccatcagccgggacaacagcaagaacaccctgtacctgcagatgaacagcctgcgggccgaggacaccgccgtgtactactgcgccagggacacctacctgcacttcgactactggggccagggcaccctggtcaccgtctcctcagcttccaccaagggcccatccgtcttccccctggcgccctgctccaggagcacctccgagagcacagcggccctgggctgcctggtcaaggactacttccccgaaccggtgacggtgtcgtggaactcaggcgctctgaccagcggcgtgcacaccttcccagctgtcctacagtcctcaggactctactccctcagcagcgtggtgacagtgccctccagcaacttcggcacccagacctacacctgcaacgtagatcacaagcccagcaacaccaaggtggacaagacagttgagcgcaaatgttgtgtcgagtgcccaccgtgcccagcaccacctgtggcaggaccgtcagtcttcctcttccccccaaaacccaaggacaccctcatgatctcccggacccctgaggtcacgtgcgtggtggtggacgtgagccacgaagaccccgaggtccagttcaactggtacgtggacggcgtggaggtgcataatgccaagacaaagccacgggaggagcagttcaacagcacgttccgtgtggtcagcgtcctcaccgttgtgcaccaggactggctgaacggcaaggagtacaagtgcaaggtctccaacaaaggcctcccagcccccatcgagaaaaccatctccaaaaccaaagggcagccccgagaaccacaggtgtacaccctgcccccatcccgggaggagatgaccaagaaccaggtcagcctgacctgcctggtcaaaggcttctaccccagcgacatcgccgtggagtgggagagcaatgggcagccggagaacaactacaagaccacacctcccatgctggactccgacggctccttcttcctctacagcaagctcaccgtggacaagagcaggtggcagcaggggaacgtcttctcatgctccgtgatgcatgaggctctgcacaaccactacacgcagaagagcctctccctgtctccgggtaaatga

SEQ ID NO: 579 - DNA, 1386 bp, Homo sapiens
atggcttgggtgtggaccttgccattcctgatggcagctgcccaaagtgtccaggcccaggtgcagctggtcgagagcggcggagggctggtgcagcctggcggcagcctgagactgagctgcgccgccagcggcttcaccttcagaagccactggctgtcctgggtgcggcaggcccctggcaagggcctggaatgggtgtccgccaccaacagatacggctacacctactacgccgacagcgtgaagggccggttcaccatcagccgggacaacagcaagaacaccctgtacctgcagatgaacagcctgcgggccgaggacaccgccgtgtactactgcgccagggacacctacctgcacttcgactactggggccagggcaccctggtcaccgtctcctcagcttccaccaagggcccatccgtcttccccctggcgccctgctccaggagcacctccgagagcacagcggccctgggctgcctggtcaaggactacttccccgaaccggtgacggtgtcgtggaactcaggcgctctgaccagcggcgtgcacaccttcccagctgtcctacagtcctcaggactctactccctcagcagcgtggtgacagtgccctccagcaacttcggcacccagacctacacctgcaacgtagatcacaagcccagcaacaccaaggtggacaagacagttgagcgcaaatgttgtgtcgagtgcccaccgtgcccagcaccacctgtggcaggaccgtcagtcttcctcttccccccaaaacccaaggacaccctcatgatctcccggacccctgaggtcacgtgcgtggtggtggacgtgagccacgaagaccccgaggtccagttcaactggtacgtggacggcgtggaggtgcataatgccaagacaaagccacgggaggagcagttcaacagcacgttccgtgtggtcagcgtcctcaccgttgtgcaccaggactggctgaacggcaaggagtacaagtgcaaggtctccaacaaaggcctcccagcccccatcgagaaaaccatctccaaaaccaaagggcagccccgagaaccacaggtgtacaccctgcccccatcccgggaggagatgaccaagaaccaggtcagcctgacctgcctggtcaaaggcttctaccccagcgacatcgccgtggagtgggagagcaatgggcagccggagaacaactacaagaccacacctcccatgctggactccgacggctccttcttcctctacagcaagctcaccgtggacaagagcaggtggcagcaggggaacgtcttctcatgctccgtgatgcatgaggctctgcacaaccactacacgcagaagagcctctccctgtctccgggtaaatga

SEQ ID NO: 580 - DNA, 1389 bp, Homo sapiens; identical to SEQ ID NO: 573

SEQ ID NO: 581 - DNA, 1386 bp, Homo sapiens
atggcttgggtgtggaccttgccattcctgatggcagctgcccaaagtgtccaggcccaggtgcagctggtcgagagcggcggagggctggtgcagcctggcggcagcctgagactgagctgcgccgccagcggcttcaccttcagaagccactggctgtcctgggtgcggcaggcccctggcaagggcctggaatgggtgtccgtgatcaccccctacggcgacacctactacgccgacagcgtgaagggccggttcaccatcagccgggacaacagcaagaacaccctgtacctgcagatgaacagcctgcgggccgaggacaccgccgtgtactactgcgccagggacacctacctgcacttcgactactggggccagggcaccctggtcaccgtctcctcagcttccaccaagggcccatccgtcttccccctggcgccctgctccaggagcacctccgagagcacagcggccctgggctgcctggtcaaggactacttccccgaaccggtgacggtgtcgtggaactcaggcgctctgaccagcggcgtgcacaccttcccagctgtcctacagtcctcaggactctactccctcagcagcgtggtgacagtgccctccagcaacttcggcacccagacctacacctgcaacgtagatcacaagcccagcaacaccaaggtggacaagacagttgagcgcaaatgttgtgtcgagtgcccaccgtgcccagcaccacctgtggcaggaccgtcagtcttcctcttccccccaaaacccaaggacaccctcatgatctcccggacccctgaggtcacgtgcgtggtggtggacgtgagccacgaagaccccgaggtccagttcaactggtacgtggacggcgtggaggtgcataatgccaagacaaagccacgggaggagcagttcaacagcacgttccgtgtggtcagcgtcctcaccgttgtgcaccaggactggctgaacggcaaggagtacaagtgcaaggtctccaacaaaggcctcccagcccccatcgagaaaaccatctccaaaaccaaagggcagccccgagaaccacaggtgtacaccctgcccccatcccgggaggagatgaccaagaaccaggtcagcctgacctgcctggtcaaaggcttctaccccagcgacatcgccgtggagtgggagagcaatgggcagccggagaacaactacaagaccacacctcccatgctggactccgacggctccttcttcctctacagcaagctcaccgtggacaagagcaggtggcagcaggggaacgtcttctcatgctccgtgatgcatgaggctctgcacaaccactacacgcagaagagcctctccctgtctccgggtaaatga

SEQ ID NO: 582 - DNA, 1386 bp, Homo sapiens; identical to SEQ ID NO: 581

SEQ ID NO: 583 - DNA, 393 bp, Homo sapiens
atgaaaaagacagctatcgcgattgcagtggcactggctggtttcgctaccgtagcgcaggccgatatcgaactgacccagccgccttcagtgagcgttgcaccaggtcagaccgcgcgtatctcgtgtagcggcgataatattggttctttttatgttcattggtaccagcagaaacccgggcaggcgccagttcttgtgatttatgatgataataatcgtccctcaggcatcccggaacgctttagcggatccaacagcggcaacaccgcgaccctgaccattagcggcactcaggcggaagacgaagcggattattattgcggttcttgggctggttcttctggttcttatgtgtttggcggccgcacgaagttaaccgttcttggccag

SEQ ID NO: 584 - DNA, 714 bp, Homo sapiens
atgagtgtgctcactcaggtcctggcgttgctgctgctgtggcttacaggtacgcgttgcgacatcgccctgacccagcccgccagcgtgagcggcagccctggccagagcatcaccatcagctgcaccggcaccagcagcgacgtgggcgacatcaacgacgtgagctggtatcagcagcaccccggcaaggcccccaagctgatgatctacgacgtgaacaaccggcccagcggcgtgagcaaccggttcagcggcagcaagagcggcaacaccgccagcctgaccatcagcggcctccaggccgaggacgaggccgactactactgcagcagctacggcgagagcctgaccagctacgtgtttggcggcggaaccaagcttaccgtcctaggtcagcccaaggctgccccctcggtcactctgttcccgccctcctctgaggagcttcaagccaacaaggccacactggtgtgtctcataagtgacttctacccgggagccgtgacagtggcctggaaggcagatagcagccccgtcaaggcgggagtggagacaaccacaccctccaaacaaagcaacaacaagtacgcggccagcagctatctgagcctgacgcctgagcagtggaagtcccacagaagctacagctgccaggtcacgcatgaagggagcaccgtggaaaagacagtggcccctacagaatgttcatag

SEQ ID NO: 585 - DNA, 705 bp, Homo sapiens
atgagtgtgctcactcaggtcctggcgttgctgctgctgtggcttacaggtacgcgttgcgacatcgagctgacccagccccccagcgtgagcgtggcccctggccagaccgcccggatcagctgcagcggcgacaacatcggcagcttctacgtgcactggtatcagcagaagcccggccaggcccccgtgctggtgatctacgacgacaacaaccggcccagcggcatccccgagcggttcagcggcagcaacagcggcaacaccgccaccctgaccatcagcggcacccaggccgaggacgaggccgactactactgcgccagctggaccggcgtggagcccgactacgtgtttggcggcggaacaaagcttaccgtcctaggtcagcccaaggctgccccctcggtcactctgttcccgccctcctctgaggagcttcaagccaacaaggccacactggtgtgtctcataagtgacttctacccgggagccgtgacagtggcctggaaggcagatagcagccccgtcaaggcgggagtggagacaaccacaccctccaaacaaagcaacaacaagtacgcggccagcagctatctgagcctgacgcctgagcagtggaagtcccacagaagctacagctgccaggtcacgcatgaagggagcaccgtggaaaagacagtggcccctacagaatgttcatag

SEQ ID NO: 586 - DNA, 714 bp, Homo sapiens
atgagtgtgctcactcaggtcctggcgttgctgctgctgtggcttacaggtacgcgttgcgacatcgccctgacccagcccgccagcgtgagcggcagccctggccagagcatcaccatcagctgcaccggcaccagcagcgacgtgggcgacatcaacgacgtgagctggtatcagcagcaccccggcaaggcccccaagctgatgatctacgacgtgaacaaccggcccagcggcgtgagcaaccggttcagcggcagcaagagcggcaacaccgccagcctgaccatcagcggcctccaggccgaggacgaggccgactactactgccagagctacgccggcagctacctgagcgaggtgttcggcggagggaccaagcttaccgtcctaggtcagcccaaggctgccccctcggtcactctgttcccgccctcctctgaggagcttcaagccaacaaggccacactggtgtgtctcataagtgacttctacccgggagccgtgacagtggcctggaaggcagatagcagccccgtcaaggcgggagtggagacaaccacaccctccaaacaaagcaacaacaagtacgcggccagcagctatctgagcctgacgcctgagcagtggaagtcccacagaagctacagctgccaggtcacgcatgaagggagcaccgtggaaaagacagtggcccctacagaatgttcatag

SEQ ID NO: 587 - DNA, 714 bp, Homo sapiens; identical to SEQ ID NO: 584

SEQ ID NO: 588 - DNA, 714 bp, Homo sapiens; identical to SEQ ID NO: 584

SEQ ID NO: 589 - DNA, 714 bp, Homo sapiens; identical to SEQ ID NO: 584

SEQ ID NO: 590 - DNA, 714 bp, Homo sapiens; identical to SEQ ID NO: 584

SEQ ID NO: 591 - DNA, 714 bp, Homo sapiens
atgagtgtgctcactcaggtcctggcgttgctgctgctgtggcttacaggtacgcgttgcgacatcgccctgacccagcccgccagcgtgagcggcagccctggccagagcatcaccatcagctgcaccggcaccagcagcgacgtgggcgacatcaacgacgtgagctggtatcagcagcaccccggcaaggcccccaagctgatgatctacgacgtgaacaaccggcccagcggcgtgagcaaccggttcagcggcagcaagagcggcaacaccgccagcctgaccatcagcggcctccaggccgaggacgaggccgactactactgcagcacctacgacggccctggcctgagcgaggtgttcggcggagggaccaagcttaccgtcctaggtcagcccaaggctgccccctcggtcactctgttcccgccctcctctgaggagcttcaagccaacaaggccacactggtgtgtctcataagtgacttctacccgggagccgtgacagtggcctggaaggcagatagcagccccgtcaaggcgggagtggagacaaccacaccctccaaacaaagcaacaacaagtacgcggccagcagctatctgagcctgacgcctgagcagtggaagtcccacagaagctacagctgccaggtcacgcatgaagggagcaccgtggaaaagacagtggcccctacagaatgttcatag

SEQ ID NO: 592 - DNA, 714 bp, Homo sapiens; identical to SEQ ID NO: 591

SEQ ID NO: 593 - DNA, 714 bp, Homo sapiens; identical to SEQ ID NO: 591

SEQ ID NO: 594 - protein, 213 aa, Homo sapiens; identical to SEQ ID NO: 397

SEQ ID NO: 595 - protein, 14 aa, Homo sapiens
ARLLNAIGRGKWWR

SEQ ID NO: 596 - protein, 15 aa, Homo sapiens
RLVASCKCKRLTRFH

SEQ ID NO: 597 - protein, 13 aa, Homo sapiens
GGGSGGGGSGGGG

SEQ ID NO: 598 - protein, 19 aa, Homo sapiens
GGGGSGGGGSGGGGSGGGG

SEQ ID NO: 599 - DNA, 21 bp, Artificial
  siRNA
taaattatcataaagtcctaa

SEQ ID NO: 600 - DNA, 21 bp, Artificial
  siRNA
aggactttatgataatttatt

SEQ ID NO: 601 - DNA, 21 bp, Artificial
  siRNA
atagtggttaaataactccag

SEQ ID NO: 602 - DNA, 21 bp, Artificial
  siRNA
ggagttatttaaccactattt

SEQ ID NO: 603 - DNA, 21 bp, Artificial
  siRNA
taaattctcgtgatgtgccat

SEQ ID NO: 604 - DNA, 21 bp, Artificial
  siRNA
ggcacatcacgagaatttatt

SEQ ID NO: 605 - DNA, 21 bp, Artificial
  siRNA
tttcttatagcacagctggtt

SEQ ID NO: 606 - DNA, 21 bp, Artificial
  siRNA
ccagctgtgctataagaaatt

SEQ ID NO: 607 - DNA, 21 bp, Artificial
  siRNA
tagacctttccatccacgctg

SEQ ID NO: 608 - DNA, 21 bp, Artificial
  siRNA
gcgtggatggaaaggtctatt

SEQ ID NO: 609 - DNA, 29 bp, Artificial
  siRNA
atgcagctcccactggccctgtgtcttgt

SEQ ID NO: 610 - DNA, 30 bp, Artificial
  siRNA
aatcaggccgagctggagaacgcctactag

SEQ ID NO: 611 - protein, 102 aa, Artificial Sequence
  KERE-class Nanobody
  misc_feature (31)..(35): CDR
  misc_feature (31)..(35): Xaa is any amino acid
  misc_feature (50)..(54): CDR
  misc_feature (50)..(54): Xaa is any amino acid
  misc_feature (87)..(91): CDR
  misc_feature (87)..(91): Xaa is any amino acid
EVQLVESGGGLVQPGGSLRLSCAASGIPFSXXXXXWFRQAPGKQRDSVAXXXXXRFTISRDNAKNTVYLQMNSLKPEDTAVYRCYFXXXXXWGQGTQVTVSS

SEQ ID NO: 612 - protein, 102 aa, Artificial Sequence
  KERE-class Nanobody
  misc_feature (31)..(35): CDR
  misc_feature (31)..(35): Xaa is any amino acid
  misc_feature (50)..(54): CDR
  misc_feature (50)..(54): Xaa is any amino acid
  misc_feature (87)..(91): CDR
  misc_feature (87)..(91): Xaa is any amino acid
QVKLEESGGGLVQAGGSLRLSCVGSGRTFSXXXXXWFRLAPGKEREFVAXXXXXRFTISRDTASNRGYLHMNNLTPEDTAVYYCAAXXXXXWGQGTQVTVSS

SEQ ID NO: 613 - protein, 102 aa, Artificial Sequence
  KERE-class Nanobody
  misc_feature (31)..(35): CDR
  misc_feature (31)..(35): Xaa is any amino acid
  misc_feature (50)..(54): CDR
  misc_feature (50)..(54): Xaa is any amino acid
  misc_feature (87)..(91): CDR
  misc_feature (87)..(91): Xaa is any amino acid
AVQLVDSGGGLVQAGDSLKLSCALTGGAFTXXXXXWFRQTPGREREFVAXXXXXRFTISRDNAKNMVYLRMNSLIPEDAAVYSCAAXXXXXWGQGTLVTVSS

SEQ ID NO: 614 - protein, 102 aa, Artificial Sequence
  KERE-class Nanobody
  misc_feature (31)..(35): CDR
  misc_feature (31)..(35): Xaa is any amino acid
  misc_feature (50)..(54): CDR
  misc_feature (50)..(54): Xaa is any amino acid
  misc_feature (87)..(91): CDR
  misc_feature (87)..(91): Xaa is any amino acid
QVQLVESGGGLVEAGGSLRLSCTASESPFRXXXXXWFRQTSGQEREFVAXXXXXRFTISRDDAKNTVWLHGSTLKPEDTAVYYCAAXXXXXWGQGTQVTVSS

SEQ ID NO: 615 - protein, 102 aa, Artificial Sequence
  KERE-class Nanobody
  misc_feature (31)..(35): CDR
  misc_feature (31)..(35): Xaa is any amino acid
  misc_feature (50)..(54): CDR
  misc_feature (50)..(54): Xaa is any amino acid
  misc_feature (87)..(91): CDR
  misc_feature (87)..(91): Xaa is any amino acid
AVQLVESGGGLVQGGGSLRLACAASERIFDXXXXXWYRQGPGNERELVAXXXXXRFTISMDYTKQTVYLHMNSLRPEDTGLYYCKIXXXXXWGQGTQVTVSS

SEQ ID NO: 616 - protein, 102 aa, Artificial Sequence
  KERE-class Nanobody
  misc_feature (31)..(35): CDR
  misc_feature (31)..(35): Xaa is any amino acid
  misc_feature (50)..(54): CDR
  misc_feature (50)..(54): Xaa is any amino acid
  misc_feature (87)..(91): CDR
  misc_feature (87)..(91): Xaa is any amino acid
DVKFVESGGGLVQAGGSLRLSCVASGFNFDXXXXXWFRQAPGKEREEVAXXXXXRFTISSEKDKNSVYLQMNSLKPEDTALYICAGXXXXXWGRGTQVTVSS

SEQ ID NO: 617 - protein, 102 aa, Artificial Sequence
  KERE-class Nanobody
  misc_feature (31)..(35): CDR
  misc_feature (31)..(35): Xaa is any amino acid
  misc_feature (50)..(54): CDR
  misc_feature (50)..(54): Xaa is any amino acid
  misc_feature (87)..(91): CDR
  misc_feature (87)..(91): Xaa is any amino acid
QVRLAESGGGLVQSGGSLRLSCVASGSTYTXXXXXWYRQYPGKQRALVAXXXXXRFTIARDSTKDTFCLQMNNLKPEDTAVYYCYAXXXXXWGQGTQVTVSS

SEQ ID NO: 618 - protein, 102 aa, Artificial Sequence
  KERE-class Nanobody
  misc_feature (31)..(35): CDR
  misc_feature (31)..(35): Xaa is any amino acid
  misc_feature (50)..(54): CDR
  misc_feature (50)..(54): Xaa is any amino acid
  misc_feature (87)..(91): CDR
  misc_feature (87)..(91): Xaa is any amino acid
EVQLVESGGGLVQAGGSLRLSCAASGFTSDXXXXXWFRQAPGKPREGVSXXXXXRFTISTDNAKNTVHLLMNRVNAEDTALYYCAVXXXXXWGRGTRVTVSS

SEQ ID NO: 619 - protein, 102 aa, Artificial Sequence
  KERE-class Nanobody
  misc_feature (31)..(35): CDR
  misc_feature (31)..(35): Xaa is any amino acid
  misc_feature (50)..(54): CDR
  misc_feature (50)..(54): Xaa is any amino acid
  misc_feature (87)..(91): CDR
  misc_feature (87)..(91): Xaa is any amino acid
QVQLVESGGGLVQPGGSLRLSCQASGDISTXXXXXWYRQVPGKLREFVAXXXXXRFTISGDNAKRAIYLQMNNLKPDDTAVYYCNRXXXXXWGQGTQVTVSP

SEQ ID NO: 620 - protein, 102 aa, Artificial Sequence
  KERE-class Nanobody
  misc_feature (31)..(35): CDR
  misc_feature (31)..(35): Xaa is any amino acid
  misc_feature (50)..(54): CDR
  misc_feature (50)..(54): Xaa is any amino acid
  misc_feature (87)..(91): CDR
  misc_feature (87)..(91): Xaa is any amino acid
QVPVVESGGGLVQAGDSLRLFCAVPSFTSTXXXXXWFRQAPGKEREFVAXXXXXRFTISRNATKNTLTLRMDSLKPEDTAVYYCAAXXXXXWGQGTQVTVSS

SEQ ID NO: 621 - protein, 102 aa, Artificial Sequence
  KERE-class Nanobody
  misc_feature (31)..(35): CDR
  misc_feature (31)..(35): Xaa is any amino acid
  misc_feature (50)..(54): CDR
  misc_feature (50)..(54): Xaa is any amino acid
  misc_feature (87)..(91): CDR
  misc_feature (87)..(91): Xaa is any amino acid
EVQLVESGGGLVQAGDSLRLFCTVSGGTASXXXXXWFRQAPGEKREFVAXXXXXRFTIARENAGNMVYLQMNNLKPDDTALYTCAAXXXXXWGRGTQVTVSS

SEQ ID NO: 622 - protein, 102 aa, Artificial Sequence
  KERE-class Nanobody
  misc_feature (31)..(35): CDR
  misc_feature (31)..(35): Xaa is any amino acid
  misc_feature (50)..(54): CDR
  misc_feature (50)..(54): Xaa is any amino acid
  misc_feature (87)..(91): CDR
  misc_feature (87)..(91): Xaa is any amino acid
AVQLVESGGDSVQPGDSQTLSCAASGRTNSXXXXXWFRQAPGKERVFLAXXXXXRFTISRDSAKNMMYLQMNNLKPQDTAVYYCAAXXXXXWGQGTQVTVSS

SEQ ID NO: 623 - protein, 102 aa, Artificial Sequence
  KERE-class Nanobody
  misc_feature (31)..(35): CDR
  misc_feature (31)..(35): Xaa is any amino acid
  misc_feature (50)..(54): CDR
  misc_feature (50)..(54): Xaa is any amino acid
  misc_feature (87)..(91): CDR
  misc_feature (87)..(91): Xaa is any amino acid
AVQLVESGGGLVQAGGSLRLSCVVSGLTSSXXXXXWFRQTPWQERDFVAXXXXXRFTISRDNYKDTVLLEMNFLKPEDTAIYYCAAXXXXXWGQGTQVTVSS

SEQ ID NO: 624 - protein, 102 aa, Artificial Sequence
  KERE-class Nanobody
  misc_feature (31)..(35): CDR
  misc_feature (31)..(35): Xaa is any amino acid
  misc_feature (50)..(54): CDR
  misc_feature (50)..(54): Xaa is any amino acid
  misc_feature (87)..(91): CDR
  misc_feature (87)..(91): Xaa is any amino acid
AVQLVESGGGLVQAGASLRLSCATSTRTLDXXXXXWFRQAPGRDREFVAXXXXXRFTVSRDSAENTVALQMNSLKPEDTAVYYCAAXXXXXWGQGTRVTVSS

SEQ ID NO: 625 - protein, 102 aa, Artificial Sequence
  KERE-class Nanobody
  misc_feature (31)..(35): CDR
  misc_feature (31)..(35): Xaa is any amino acid
  misc_feature (50)..(54): CDR
  misc_feature (50)..(54): Xaa is any amino acid
  misc_feature (87)..(91): CDR
  misc_feature (87)..(91): Xaa is any amino acid
QVQLVESGGGLVQPGGSLRLSCTVSRLTAHXXXXXWFRQAPGKEREAVSXXXXXRFTISRDYAGNTAFLQMDSLKPEDTGVYYCATXXXXXWGQGTQVTVSS

SEQ ID NO: 626 - protein, 102 aa, Artificial Sequence
  KERE-class Nanobody
  misc_feature (31)..(35): CDR
  misc_feature (31)..(35): Xaa is any amino acid
  misc_feature (50)..(54): CDR
  misc_feature (50)..(54): Xaa is any amino acid
  misc_feature (87)..(91): CDR
  misc_feature (87)..(91): Xaa is any amino acid
EVQLVESGGELVQAGGSLKLSCTASGRNFVXXXXXWFRRAPGKEREFVAXXXXXRFTVSRDNGKNTAYLRMNSLKPEDTADYYCAVXXXXXLGSGTQVTVSS

SEQ ID NO: 627 - protein, 102 aa, Artificial Sequence
  GLEW-class Nanobody
  misc_feature (31)..(35): CDR
  misc_feature (31)..(35): Xaa is any amino acid
  misc_feature (50)..(54): CDR
  misc_feature (50)..(54): Xaa is any amino acid
  misc_feature (87)..(91): CDR
  misc_feature (87)..(91): Xaa is any amino acid
AVQLVESGGGLVQPGGSLRLSCAASGFTFSXXXXXWVRQAPGKVLEWVSXXXXXRFTISRDNAKNTLYLQMNSLKPEDTAVYYCVKXXXXXGSQGTQVTVSS

SEQ ID NO: 628 - protein, 102 aa, Artificial Sequence
  GLEW-class Nanobody
  misc_feature (31)..(35): CDR
  misc_feature (31)..(35): Xaa is any amino acid
  misc_feature (50)..(54): CDR
  misc_feature (50)..(54): Xaa is any amino acid
  misc_feature (87)..(91): CDR
  misc_feature (87)..(91): Xaa is any amino acid
EVQLVESGGGLVQPGGSLRLSCVCVSSGCTXXXXXWVRQAPGKAEEWVSXXXXXRFKISRDNAKKTLYLQMNSLGPEDTAMYYCQRXXXXXRGQGTQVTVSS

SEQ ID NO: 629 - protein, 102 aa, Artificial Sequence
  GLEW-class Nanobody
  misc_feature (31)..(35): CDR
  misc_feature (31)..(35): Xaa is any amino acid
  misc_feature (50)..(54): CDR
  misc_feature (50)..(54): Xaa is any amino acid
  misc_feature (87)..(91): CDR
  misc_feature (87)..(91): Xaa is any amino acid
EVQLVESGGGLALPGGSLTLSCVFSGSTFSXXXXXWVRHTPGKAEEWVSXXXXXRFTISRDNAKNTLYLEMNSLSPEDTAMYYCGRXXXXXRSKGIQVTVSS

SEQ ID NO: 630 - protein, 102 aa, Artificial Sequence
  P,R,S 103-class Nanobody
  misc_feature (31)..(35): CDR
  misc_feature (31)..(35): Xaa is any amino acid
  misc_feature (50)..(54): CDR
  misc_feature (50)..(54): Xaa is any amino acid
  misc_feature (87)..(91): CDR
  misc_feature (87)..(91): Xaa is any amino acid
AVQLVESGGGLVQAGGSLRLSCAASGRTFSXXXXXWFRQAPGKEREFVAXXXXXRFTISRDNAKNTVYLQMNSLKPEDTAVYYCAAXXXXXRGQGTQVTVSS

SEQ ID NO: 631 - protein, 102 aa, Artificial Sequence
  P,R,S 103-class Nanobody
  misc_feature (31)..(35): CDR
  misc_feature (31)..(35): Xaa is any amino acid
  misc_feature (50)..(54): CDR
  misc_feature (50)..(54): Xaa is any amino acid
  misc_feature (87)..(91): CDR
  misc_feature (87)..(91): Xaa is any amino acid
DVQLVESGGDLVQPGGSLRLSCAASGFSFDXXXXXWLRQTPGKGLEWVGXXXXXRFTISRDNAKNMLYLHLNNLKSEDTAVYYCRRXXXXXLGQGTQVTVSS

SEQ ID NO: 632 - protein, 102 aa, Artificial Sequence; identical to SEQ ID NO: 628
  P,R,S 103-class Nanobody
  misc_feature (31)..(35): CDR
  misc_feature (31)..(35): Xaa is any amino acid
  misc_feature (50)..(54): CDR
  misc_feature (50)..(54): Xaa is any amino acid
  misc_feature (87)..(91): CDR
  misc_feature (87)..(91): Xaa is any amino acid

SEQ ID NO: 633 - protein, 30 aa, Artificial Sequence
  KERE-class Nanobody FW1 sequence
QVQRVESGGGLVQAGGSLRLSCAASGRTSS

SEQ ID NO: 634 - protein, 30 aa, Artificial Sequence
  KERE-class Nanobody FW1 sequence
QVQLVESGGGLVQTGDSLSLSCSASGRTFS

SEQ ID NO: 635 - protein, 30 aa, Artificial Sequence
  KERE-class Nanobody FW1 sequence
QVKLEESGGGLVQAGDSLRLSCAATGRAFG

SEQ ID NO: 636 - protein, 30 aa, Artificial Sequence
  KERE-class Nanobody FW1 sequence
AVQLVESGGGLVQPGESLGLSCVASGRDFV

SEQ ID NO: 637 - protein, 30 aa, Artificial Sequence
  KERE-class Nanobody FW1 sequence
EVQLVESGGGLVQAGGSLRLSCEVLGRTAG

SEQ ID NO: 638 - protein, 30 aa, Artificial Sequence
  KERE-class Nanobody FW1 sequence
QVQLVESGGGWVQPGGSLRLSCAASETILS

SEQ ID NO: 639 - protein, 30 aa, Artificial Sequence
  KERE-class Nanobody FW1 sequence
QVQLVESGGGTVQPGGSLNLSCVASGNTFN

SEQ ID NO: 640 - protein, 30 aa, Artificial Sequence
  KERE-class Nanobody FW1 sequence
EVQLVESGGGLAQPGGSLQLSCSAPGFTLD

SEQ ID NO: 641 - protein, 30 aa, Artificial Sequence
  KERE-class Nanobody FW1 sequence
AQELEESGGGLVQAGGSLRLSCAASGRTFN

SEQ ID NO: 642 - protein, 22 aa, Artificial Sequence
  KERE-class Nanobody FW1 sequence
VESGGGLVQPGGSLRLSCAASG

SEQ ID NO: 643 - protein, 22 aa, Artificial Sequence
  KERE-class Nanobody FW1 sequence
VDSGGGLVQAGDSLKLSCALTG

SEQ ID NO: 644 - protein, 22 aa, Artificial Sequence
  KERE-class Nanobody FW1 sequence
VDSGGGLVQAGDSLRLSCAASG

SEQ ID NO: 645 - protein, 22 aa, Artificial Sequence
  KERE-class Nanobody FW1 sequence
VDSGGGLVEAGGSLRLSCQVSE

SEQ ID NO: 646 - protein, 22 aa, Artificial Sequence
  KERE-class Nanobody FW1 sequence
QDSGGGSVQAGGSLKLSCAASG

SEQ ID NO: 647 - protein, 22 aa, Artificial Sequence
  KERE-class Nanobody FW1 sequence
VQSGGRLVQAGDSLRLSCAASE

SEQ ID NO: 648 - protein, 22 aa, Artificial Sequence
  KERE-class Nanobody FW1 sequence
VESGGTLVQSGDSLKLSCASST

SEQ ID NO: 649 - protein, 22 aa, Artificial Sequence
  KERE-class Nanobody FW1 sequence
MESGGDSVQSGGSLTLSCVASG

SEQ ID NO: 650 - protein, 22 aa, Artificial Sequence
  KERE-class Nanobody FW1 sequence
QASGGGLVQAGGSLRLSCSASV

SEQ ID NO: 651 - protein, 14 aa, Artificial Sequence
  KERE-class Nanobody FW2 sequence
WFRQAPGKEREFVA

SEQ ID NO: 652 - protein, 14 aa, Artificial Sequence
  KERE-class Nanobody FW2 sequence
WFRQTPGREREFVA

SEQ ID NO: 653 - protein, 14 aa, Artificial Sequence
  KERE-class Nanobody FW2 sequence
WYRQAPGKQREMVA

SEQ ID NO: 654 - protein, 14 aa, Artificial Sequence
  KERE-class Nanobody FW2 sequence
WYRQGPGKQRELVA

SEQ ID NO: 655 - protein, 14 aa, Artificial Sequence
  KERE-class Nanobody FW2 sequence
WIRQAPGKEREGVS

SEQ ID NO: 656 - protein, 14 aa, Artificial Sequence
  KERE-class Nanobody FW2 sequence
WFREAPGKEREGIS

SEQ ID NO: 657 - protein, 14 aa, Artificial Sequence
  KERE-class Nanobody FW2 sequence
WYRQAPGKERDLVA

SEQ ID NO: 658 - protein, 14 aa, Artificial Sequence
  KERE-class Nanobody FW2 sequence
WFRQAPGKQREEVS

SEQ ID NO: 659 - protein, 14 aa, Artificial Sequence
  KERE-class Nanobody FW2 sequence
WFRQPPGKVREFVG

SEQ ID NO: 660 - protein, 32 aa, Artificial Sequence
  KERE-class Nanobody FW3 sequence
RFTISRDNAKNTVYLQMNSLKPEDTAVYRCYF

SEQ ID NO: 661 - protein, 32 aa, Artificial Sequence
  KERE-class Nanobody FW3 sequence
RFAISRDNNKNTGYLQMNSLEPEDTAVYYCAA

SEQ ID NO: 662 - protein, 32 aa, Artificial Sequence
  KERE-class Nanobody FW3 sequence
RFTVARNNAKNTVNLEMNSLKPEDTAVYYCAA

SEQ ID NO: 663 - protein, 32 aa, Artificial Sequence
  KERE-class Nanobody FW3 sequence
RFTISRDIAKNTVDLLMNNLEPEDTAVYYCAA

SEQ ID NO: 664 - protein, 32 aa, Artificial Sequence
  KERE-class Nanobody FW3 sequence
RLTISRDNAVDTMYLQMNSLKPEDTAVYYCAA

SEQ ID NO: 665 - protein, 32 aa, Artificial Sequence
  KERE-class Nanobody FW3 sequence
RFTISRDNAKNTVYLQMDNVKPEDTAIYYCAA

SEQ ID NO: 666 - protein, 32 aa, Artificial Sequence
  KERE-class Nanobody FW3 sequence
RFTISKDSGKNTVYLQMTSLKPEDTAVYYCAT

SEQ ID NO: 667 - protein, 32 aa, Artificial Sequence
  KERE-class Nanobody FW3 sequence
RFTISRDSAKNMMYLQMNNLKPQDTAVYYCAA

SEQ ID NO: 668 - protein, 32 aa, Artificial Sequence
  KERE-class Nanobody FW3 sequence
RFTISRENDKSTVYLQLNSLKPEDTAVYYCAA

SEQ ID NO: 669 - protein, 32 aa, Artificial Sequence
  KERE-class Nanobody FW3 sequence
RFTISRDYAGNTAYLQMNSLKPEDTGVYYCAT

SEQ ID NO: 670 - protein, 11 aa, Artificial Sequence
  KERE-class Nanobody FW4 sequence
WGQGTQVTVSS

SEQ ID NO: 671 - protein, 11 aa, Artificial Sequence
  KERE-class Nanobody FW4 sequence
WGKGTLVTVSS

SEQ ID NO: 672 - protein, 11 aa, Artificial Sequence
  KERE-class Nanobody FW4 sequence
RGQGTRVTVSS

SEQ ID NO: 673 - protein, 11 aa, Artificial Sequence
  KERE-class Nanobody FW4 sequence
WGLGTQVTISS

SEQ ID NO: 674 - protein, 30 aa, Artificial Sequence
  GLEW-class Nanobody FW1 sequence
QVQLVESGGGLVQPGGSLRLSCAASGFTFS

SEQ ID NO: 675 - protein, 30 aa, Artificial Sequence
  GLEW-class Nanobody FW1 sequence
EVHLVESGGGLVRPGGSLRLSCAAFGFIFK

SEQ ID NO: 676 - protein, 30 aa, Artificial Sequence
  GLEW-class Nanobody FW1 sequence
QVKLEESGGGLAQPGGSLRLSCVASGFTFS

SEQ ID NO: 677 - protein, 30 aa, Artificial Sequence
  GLEW-class Nanobody FW1 sequence
EVQLVESGGGLVQPGGSLRLSCVCVSSGCT

SEQ ID NO: 678 - protein, 30 aa, Artificial Sequence
  GLEW-class Nanobody FW1 sequence
EVQLVESGGGLALPGGSLTLSCVFSGSTFS

SEQ ID NO: 679 - protein, 22 aa, Artificial Sequence
  GLEW-class Nanobody FW1 sequence
VESGGGLVQPGGSLRLSCAASG

SEQ ID NO: 680 - protein, 22 aa, Artificial Sequence
  GLEW-class Nanobody FW1 sequence
EESGGGLAQPGGSLRLSCVASG

SEQ ID NO: 681 - protein, 22 aa, Artificial Sequence
  GLEW-class Nanobody FW1 sequence
VESGGGLALPGGSLTLSCVFSG

SEQ ID NO: 682 - protein, 14 aa, Artificial Sequence
  GLEW-class Nanobody FW2 sequence
WVRQAPGKVLEWVS

SEQ ID NO: 683 - protein, 14 aa, Artificial Sequence
  GLEW-class Nanobody FW2 sequence
WVRRPPGKGLEWVS

SEQ ID NO: 684 - protein, 14 aa, Artificial Sequence
  GLEW-class Nanobody FW2 sequence
WVRQAPGMGLEWVS

SEQ ID NO: 685 - protein, 14 aa, Artificial Sequence
  GLEW-class Nanobody FW2 sequence
WVRQAPGKEPEWVS

SEQ ID NO: 686 - protein, 14 aa, Artificial Sequence
  GLEW-class Nanobody FW2 sequence
WVRQAPGKDQEWVS

SEQ ID NO: 687 - protein, 14 aa, Artificial Sequence
  GLEW-class Nanobody FW2 sequence
WVRQAPGKAEEWVS

SEQ ID NO: 688 - protein, 14 aa, Artificial Sequence
  GLEW-class Nanobody FW2 sequence
WVRQAPGKGLEWVA

SEQ ID NO: 689 - protein, 14 aa, Artificial Sequence
  GLEW-class Nanobody FW2 sequence
WVRQAPGRATEWVS

SEQ ID NO: 690 - protein, 32 aa, Artificial Sequence
  GLEW-class Nanobody FW3 sequence
RFTISRDNAKNTLYLQMNSLKPEDTAVYYCVK

SEQ ID NO: 691 - protein, 32 aa, Artificial Sequence
  GLEW-class Nanobody FW3 sequence
RFTISRDNARNTLYLQMDSLIPEDTALYYCAR

SEQ ID NO: 692 - protein, 32 aa, Artificial Sequence
  GLEW-class Nanobody FW3 sequence
RFTSSRDNAKSTLYLQMNDLKPEDTALYYCAR

SEQ ID NO: 693 - protein, 32 aa, Artificial Sequence
  GLEW-class Nanobody FW3 sequence
RFIISRDNAKNTLYLQMNSLGPEDTAMYYCQR

SEQ ID NO: 694 - protein, 32 aa, Artificial Sequence
  GLEW-class Nanobody FW3 sequence
RFTASRDNAKNTLYLQMNSLKSEDTARYYCAR

SEQ ID NO: 695 - protein, 32 aa, Artificial Sequence
  GLEW-class Nanobody FW3 sequence
RFTISRDNAKNTLYLQMDDLQSEDTAMYYCGR

SEQ ID NO: 696 - protein, 11 aa, Artificial Sequence
  GLEW-class Nanobody FW4 sequence
GSQGTQVTVSS

SEQ ID NO: 697 - protein, 11 aa, Artificial Sequence
  GLEW-class Nanobody FW4 sequence
LRGGTQVTVSS

SEQ ID NO: 698 - protein, 11 aa, Artificial Sequence
  GLEW-class Nanobody FW4 sequence
RGQGTLVTVSS

SEQ ID NO: 699 - protein, 11 aa, Artificial Sequence
  GLEW-class Nanobody FW4 sequence
RSRGIQVTVSS

SEQ ID NO: 700 - protein, 11 aa, Artificial Sequence
  GLEW-class Nanobody FW4 sequence
WGKGTQVTVSS

SEQ ID NO: 701 - protein, 11 aa, Artificial Sequence
  GLEW-class Nanobody FW4 sequence
WGQGTQVTVSS

SEQ ID NO: 702 - protein, 30 aa, Artificial Sequence
  P,R,S 103-class Nanobody FW1 sequence
AVQLVESGGGLVQAGGSLRLSCAASGRTFS

SEQ ID NO: 703 - protein, 30 aa, Artificial Sequence
  P,R,S 103-class Nanobody FW1 sequence
QVQLQESGGGMVQPGGSLRLSCAASGFDFG

SEQ ID NO: 704 - protein, 30 aa, Artificial Sequence; identical to SEQ ID NO: 675
  P,R,S 103-class Nanobody FW1 sequence

SEQ ID NO: 705 - protein, 30 aa, Artificial Sequence
  P,R,S 103-class Nanobody FW1 sequence
QVQLAESGGGLVQPGGSLKLSCAASRTIVS

SEQ ID NO: 706 - protein, 30 aa, Artificial Sequence
  P,R,S 103-class Nanobody FW1 sequence
QEHLVESGGGLVDIGGSLRLSCAASERIFS

SEQ ID NO: 707 - protein, 30 aa, Artificial Sequence; identical to SEQ ID NO: 676
  P,R,S 103-class Nanobody FW1 sequence

SEQ ID NO: 708 - protein, 30 aa, Artificial Sequence; identical to SEQ ID NO: 677
  P,R,S 103-class Nanobody FW1 sequence

SEQ ID NO: 709 - protein, 30 aa, Artificial Sequence; identical to SEQ ID NO: 678
  P,R,S 103-class Nanobody FW1 sequence

SEQ ID NO: 710 - protein, 22 aa, Artificial Sequence
  P,R,S 103-class Nanobody FW1 sequence
VESGGGLVQAGGSLRLSCAASG

SEQ ID NO: 711 - protein, 22 aa, Artificial Sequence
  P,R,S 103-class Nanobody FW1 sequence
AESGGGLVQPGGSLKLSCAASR

SEQ ID NO: 712 - protein, 14 aa, Artificial Sequence
  P,R,S 103-class Nanobody FW2 sequence
WFRQAPGKEREFVA

SEQ ID NO: 713 - protein, 14 aa, Artificial Sequence
  P,R,S 103-class Nanobody FW2 sequence
WVRQAPGKVLEWVS

SEQ ID NO: 714 - protein, 14 aa, Artificial Sequence
  P,R,S 103-class Nanobody FW2 sequence
WVRRPPGKGLEWVS

SEQ ID NO: 715 - protein, 14 aa, Artificial Sequence
  P,R,S 103-class Nanobody FW2 sequence
WIRQAPGKEREGVS

SEQ ID NO: 716 - protein, 14 aa, Artificial Sequence
  P,R,S 103-class Nanobody FW2 sequence
WVRQYPGKEPEWVS

SEQ ID NO: 717 - protein, 14 aa, Artificial Sequence
  P,R,S 103-class Nanobody FW2 sequence
WFRQPPGKEHEFVA

SEQ ID NO: 718 - protein, 14 aa, Artificial Sequence
  P,R,S 103-class Nanobody FW2 sequence
WYRQAPGKRTELVA

SEQ ID NO: 719 - protein, 14 aa, Artificial Sequence
  P,R,S 103-class Nanobody FW2 sequence
WLRQAPGQGLEWVS

SEQ ID NO: 720 - protein, 14 aa, Artificial Sequence
  P,R,S 103-class Nanobody FW2 sequence
WLRQTPGKGLEWVG

SEQ ID NO: 721 - protein, 14 aa, Artificial Sequence
  P,R,S 103-class Nanobody FW2 sequence
WVRQAPGKAEEFVS

SEQ ID NO: 722 - protein, 32 aa, Artificial Sequence
  P,R,S 103-class Nanobody FW3 sequence
RFTISRDNAKNTVYLQMNSLKPEDTAVYYCAA

SEQ ID NO: 723 - protein, 32 aa, Artificial Sequence; identical to SEQ ID NO: 691
  P,R,S 103-class Nanobody FW3 sequence

SEQ ID NO: 724 - protein, 32 aa, Artificial Sequence
  P,R,S 103-class Nanobody FW3 sequence
RFTISRDNAKNEMYLQMNNLKTEDTGVYWCGA

SEQ ID NO: 725 - protein, 32 aa, Artificial Sequence
  P,R,S 103-class Nanobody FW3 sequence
RFTISSDSNRNMIYLQMNNLKPEDTAVYYCAA

SEQ ID NO: 726 - protein, 32 aa, Artificial Sequence
  P,R,S 103-class Nanobody FW3 sequence
RFTISRDNAKNMLYLHLNNLKSEDTAVYYCRR

SEQ ID NO: 727 - protein, 32 aa, Artificial Sequence
  P,R,S 103-class Nanobody FW3 sequence
RFTISRDNAKKTVYLRLNSLNPEDTAVYSCNL

SEQ ID NO: 728 - protein, 32 aa, Artificial Sequence
  P,R,S 103-class Nanobody FW3 sequence
RFKISRDNAKKTLYLQMNSLGPEDTAMYYCQR

SEQ ID NO: 729 - protein, 32 aa, Artificial Sequence
  P,R,S 103-class Nanobody FW3 sequence
RFTVSRDNGKNTAYLRMNSLKPEDTADYYCAV

SEQ ID NO: 730 - protein, 11 aa, Artificial Sequence
  P,R,S 103-class Nanobody FW4 sequence
RGQGTQVTVSS

SEQ ID NO: 731 - protein, 11 aa, Artificial Sequence
  P,R,S 103-class Nanobody FW4 sequence
LRGGTQVTVSS

SEQ ID NO: 732 - protein, 11 aa, Artificial Sequence
  P,R,S 103-class Nanobody FW4 sequence
GNKGTLVTVSS

SEQ ID NO: 733 - protein, 11 aa, Artificial Sequence
  P,R,S 103-class Nanobody FW4 sequence
SSPGTQVTVSS

SEQ ID NO: 734 - protein, 11 aa, Artificial Sequence
  P,R,S 103-class Nanobody FW4 sequence
SSQGTLVTVSS

SEQ ID NO: 735 - protein, 11 aa, Artificial Sequence
  P,R,S 103-class Nanobody FW4 sequence
RSRGIQVTVSS

SEQ ID NO: 736 - protein, 30 aa, Artificial Sequence
  FR1 sequence
EVQLVESGGGLVQPGGSLRLSCAASGSIFS

SEQ ID NO: 737 - protein, 30 aa, Artificial Sequence
  FR1 sequence
EVQLVESGGGLVQAGDSLRLSCTATGRTSS

SEQ ID NO: 738 - protein, 30 aa, Artificial Sequence
  FR1 sequence
EVQLVESGGGLVQAGGSLRLSCATSGFTFS

SEQ ID NO: 739 - protein, 30 aa, Artificial Sequence
  FR1 sequence
KVQLVESGGGLVQAGGSLRLSCAASGRTFS

SEQ ID NO: 740 - protein, 30 aa, Artificial Sequence
  FR1 sequence
EVQLVESGGGLVQAGDSLRLSCAATGRTSS

SEQ ID NO: 741 - protein, 30 aa, Artificial Sequence
  FR1 sequence
EVQLVESGGGLVQAGGSLRLSCVASGRTLR

SEQ ID NO: 742 - protein, 30 aa, Artificial Sequence
  FR1 sequence
EVQLVESGGGLVQAGGSLRLTCAASGRTFS

SEQ ID NO: 743 - protein, 30 aa, Artificial Sequence
  FR1 sequence
EVQLVESGGGLVQAGGSLRLSCAASGLTFN

SEQ ID NO: 744 - protein, 30 aa, Artificial Sequence; identical to SEQ ID NO: 740
  FR1 sequence

SEQ ID NO: 745 - protein, 5 aa, Artificial Sequence
  CDR sequence
DNVMG

SEQ ID NO: 746 - protein, 5 aa, Artificial Sequence
  CDR sequence
IYNMD

SEQ ID NO: 747 - protein, 5 aa, Artificial Sequence
  CDR sequence
RFDMS

SEQ ID NO: 748 - protein, 5 aa, Artificial Sequence
  CDR sequence
SYFMG

SEQ ID NO: 749 - protein, 5 aa, Artificial Sequence
  CDR sequence
IYNMD

SEQ ID NO: 750 - protein, 5 aa, Artificial Sequence
  CDR sequence
RYVTG

SEQ ID NO: 751 - protein, 5 aa, Artificial Sequence
  CDR sequence
SFVIG

SEQ ID NO: 752 - protein, 5 aa, Artificial Sequence
  CDR sequence
QYTIT

SEQ ID NO: 753 - protein, 5 aa, Artificial Sequence
  CDR sequence
IYNMD

SEQ ID NO: 754 - protein, 14 aa, Artificial Sequence
  FR2 sequence
WYRQAPGKQRELVA

SEQ ID NO: 755 - protein, 14 aa, Artificial Sequence
  FR2 sequence
WFRQTPGKERELIA

SEQ ID NO: 756 - protein, 14 aa, Artificial Sequence
  FR2 sequence
WFRQAPGKQREFIA

SEQ ID NO: 757 - protein, 14 aa, Artificial Sequence
  FR2 sequence
WFRQAPGKEREVVA

SEQ ID NO: 758 - protein, 14 aa, Artificial Sequence
  FR2 sequence
WFLQAPGKERELIA

SEQ ID NO: 759 - protein, 14 aa, Artificial Sequence
  FR2 sequence
WFRQAPGKEREVVA

SEQ ID NO: 760 - protein, 14 aa, Artificial Sequence
  FR2 sequence
WFRQAPGKQREVVA

SEQ ID NO: 761 - protein, 14 aa, Artificial Sequence
  FR2 sequence
WFRQAPGKEREFVA

SEQ ID NO: 762 - protein, 14 aa, Artificial Sequence
  FR2 sequence
WFRQGSGKGRELIA

SEQ ID NO: 763 - protein, 16 aa, Artificial Sequence
  CDR sequence
TIWSSGHTNYADSVKG

SEQ ID NO: 764 - protein, 17 aa, Artificial Sequence
  CDR sequence
RLWWRSGSTYYADSVKG

SEQ ID NO: 765 - protein, 16 aa, Artificial Sequence
  CDR sequence
TIFSGGDTDYIDSVKG

SEQ ID NO: 766 - protein, 17 aa, Artificial Sequence
  CDR sequence
TIRWSDGSTYYEDSVKG

SEQ ID NO: 767 - protein, 17 aa, Artificial Sequence
  CDR sequence
RIWWRSGATYYADSVKG

SEQ ID NO: 768 - protein, 17 aa, Artificial Sequence
  CDR sequence
SISWSGESTYYADSVKG

SEQ ID NO: 769 - protein, 16 aa, Artificial Sequence
  CDR sequence
SITSGGSTYYEDSGKG

SEQ ID NO: 770 - protein, 17 aa, Artificial Sequence
  CDR sequence
AVSWSGSSESVSNSVKG

SEQ ID NO: 771 - protein, 17 aa, Artificial Sequence
  CDR sequence
RIWWRSGETYYADSVKG

SEQ ID NO: 772 - protein, 32 aa, Artificial Sequence
  FR3 sequence
RFTISRDNAKNTVYLQMNSLKPEDTAVYYCNL

SEQ ID NO: 773 - protein, 32 aa, Artificial Sequence
  FR3 sequence
RFTISRDNAKNTVYLQMNSLKPEDTSVYICTA

SEQ ID NO: 774 - protein, 32 aa, Artificial Sequence
  FR3 sequence
RFTISRDNAKNTVYLQMNSLKPEDTAVYYCCP

SEQ ID NO: 775 - protein, 32 aa, Artificial Sequence; identical to SEQ ID NO: 722
  FR3 sequence

SEQ ID NO: 776 - protein, 32 aa, Artificial Sequence
  FR3 sequence
RFTISRGNAKNTVYLQMNSLKPEDTGVYHCTA

SEQ ID NO: 777 - protein, 32 aa, Artificial Sequence
  FR3 sequence
RFAISRDNAKNAVYLQMNSLNLEDTGVYYCAE

SEQ ID NO: 778 - protein, 32 aa, Artificial Sequence
  FR3 sequence
RFTISRDNAKNRVYLQMNSLRPEDTAVYYCAA

SEQ ID NO: 779 - protein, 32 aa, Artificial Sequence
  FR3 sequence
RFTISRDNAKNTAYLAMNSLKPEDTAVYYCAA

SEQ ID NO: 780 - protein, 32 aa, Artificial Sequence
  FR3 sequence
RFTISRDNAKNTVYLQMNSLKPEDTNVYHCAA

SEQ ID NO: 781 - protein, 12 aa, Artificial Sequence
  CDR sequence
GTIVTGTWRSDY

SEQ ID NO: 782 - protein, 10 aa, Artificial Sequence
  CDR sequence
GDTGGAAYGY

SEQ ID NO: 783 - protein, 6 aa, Artificial Sequence
  CDR sequence
LGIEYA

SEQ ID NO: 784 - protein, 9 aa, Artificial Sequence
  CDR sequence
AKGIGVYGY

SEQ ID NO: 785 - protein, 10 aa, Artificial Sequence
  CDR sequence
GVTGGAAYGY

SEQ ID NO: 786 - protein, 9 aa, Artificial Sequence
  CDR sequence
AELPGTYDY

SEQ ID NO: 787 - protein, 9 aa, Artificial Sequence
  CDR sequence
AEPAGVYDV

SEQ ID NO: 788 - protein, 15 aa, Artificial Sequence
  CDR sequence
DRRGLASTRAADYDY

SEQ ID NO: 789 - protein, 10 aa, Artificial Sequence
  CDR sequence
GDTGGASYGY

SEQ ID NO: 790 - protein, 11 aa, Artificial Sequence
  FR4 sequence
WGQGTQVTVSS

SEQ ID NO: 791 - protein, 11 aa, Artificial Sequence
  FR4 sequence
WGQGTQVTVSS

SEQ ID NO: 792 - protein, 11 aa, Artificial Sequence
  FR4 sequence
WGQGTQVTVSS

SEQ ID NO: 793 - protein, 11 aa, Artificial Sequence
  FR4 sequence
WGQGTQVTVSS

SEQ ID NO: 794 - protein, 11 aa, Artificial Sequence
  FR4 sequence
WGQGTQVTVSS

SEQ ID NO: 795 - protein, 11 aa, Artificial Sequence
  FR4 sequence
WGQGTQVTVSS

SEQ ID NO: 796 - protein, 11 aa, Artificial Sequence
  FR4 sequence
WGQGTQVTVSS

SEQ ID NO: 797 - protein, 11 aa, Artificial Sequence
  FR4 sequence
WGQGTQVTVSS

SEQ ID NO: 798 - protein, 11 aa, Artificial Sequence
  FR4 sequence
WGQGTQVTVSS

SEQ ID NO: 799 - protein, 120 aa, Artificial Sequence
  Nanobody
EVQLVESGGGLVQPGGSLRLSCAASGSIFSDNVMGWYRQAPGKQRELVATIWSSGHTNYADSVKGRFTISRDNAKNTVYLQMNSLKPEDTAVYYCNLGTIVTGTWRSDYWGQGTQVTVSS

SEQ ID NO: 800 - protein, 119 aa, Artificial Sequence
  Nanobody
EVQLVESGGGLVQAGDSLRLSCTATGRTSSIYNMDWFRQTPGKERELIARLWWRSGSTYYADSVKGRFTISRDNAKNTVYLQMNSLKPEDTSVYICTAGDTGGAAYGYWGQGTQVTVSS

SEQ ID NO: 801 - protein, 114 aa, Artificial Sequence
  Nanobody
EVQLVESGGGLVQAGGSLRLSCATSGFTFSRFDMSWFRQAPGKQREFIATIFSGGDTDYIDSVKGRFTISRDNAKNTVYLQMNSLKPEDTAVYYCCPLGIEYAWGQGTQVTVSS

SEQ ID NO: 802 - protein, 118 aa, Artificial Sequence
  Nanobody
KVQLVESGGGLVQAGGSLRLSCAASGRTFSSYFMGWFRQAPGKEREVVATIRWSDGSTYYEDSVKGRFTISRDNAKNTVYLQMNSLKPEDTAVYYCAAAKGIGVYGYWGQGTQVTVSS

SEQ ID NO: 803 - protein, 119 aa, Artificial Sequence
  Nanobody
EVQLVESGGGLVQAGDSLRLSCAATGRTSSIYNMDWFLQAPGKERELIARIWWRSGATYYADSVKGRFTISRGNAKNTVYLQMNSLKPEDTGVYHCTAGVTGGAAYGYWGQGTQVTVSS

SEQ ID NO: 804 - protein, 118 aa, Artificial Sequence
  Nanobody
EVQLVESGGGLVQAGGSLRLSCVASGRTLRRYVTGWFRQAPGKEREVVASISWSGESTYYADSVKGRFAISRDNAKNAVYLQMNSLNLEDTGVYYCAEAELPGTYDYWGQGTQVTVSS

SEQ ID NO: 805 - protein, 117 aa, Artificial Sequence
  Nanobody
EVQLVESGGGLVQAGGSLRLTCAASGRTFSSFVIGWFRQAPGKQREVVASITSGGSTYYEDSGKGRFTISRDNAKNRVYLQMNSLRPEDTAVYYCAAAEPAGVYDVWGQGTQVTVSS

SEQ ID NO: 806 - protein, 124 aa, Artificial Sequence
  Nanobody
EVQLVESGGGLVQAGGSLRLSCAASGLTFNQYTITWFRQAPGKEREFVAAVSWSGSSESVSNSVKGRFTISRDNAKNTAYLAMNSLKPEDTAVYYCAADRRGLASTRAADYDYWGQGTQVTVSS

SEQ ID NO: 807 - protein, 119 aa, Artificial Sequence
  Nanobody
EVQLVESGGGLVQAGDSLRLSCAATGRTSSIYNMDWFRQGSGKGRELIARIWWRSGETYYADSVKGRFTISRDNAKNTVYLQMNSLKPEDTNVYHCAAGDTGGASYGYWGQGTQVTVSS

SEQ ID NO: 808 - protein, 213 aa, Homo sapiens
MQLPLALCLVCLLVHTAFRVVEGQGWQAFKNDATEIIPELGEYPEPPPELENNKTMNRAENGGRPPHHPFETKDVSEYSCRELHFTRYVTDGPCRSAKPVTELVCSGQCGPARLLPNAIGRGKWWRPSGPDFRCIPDRYRAQTVQLLCPGGEAPRARKVRLVASCKCKRLTRFHNQSELKDFGTEAARPQKGRKPRPRARSAKANQAELENAY

SEQ ID NO: 809 - protein, 213 aa, Artificial Sequence
  Recombinant sclerostin
MPLLLLLPLLWAGALAHHHHHHHQGWQAFKNDATEIIPELGEYPEPPPELENNKTMNRAENGGRPPHHPFETKDVSEYSCRELHFTRYVTDGPCRSAKPVTELVCSGQCGPARLLPNAIGRGKWWRPSGPDFRCIPDRYRAQRVQLLCPGGEAPRARKVRLVASCKCKRLTRFHNQSELKDFGTEAARPQKGRKPRPRARSAKANQAELENAY

SEQ ID NO: 810 - DNA, 798 bp, Homo sapiens
atgatggctctgggcgcagcgggagctacccgggtctttgtcgcgatggtagcggcggctctcggcggccaccctctgctgggagtgagcgccaccttgaactcggttctcaattccaacgctatcaagaacctgcccccaccgctgggcggcgctgcggggcacccaggctctgcagtcagcgccgcgccgggaatcctgtacccgggcgggaataagtaccagaccattgacaactaccagccgtacccgtgcgcagaggacgaggagtgcggcactgatgagtactgcgctagtcccacccgcggaggggacgcaggcgtgcaaatctgtctcgcctgcaggaagcgccgaaaacgctgcatgcgtcacgctatgtgctgccccgggaattactgcaaaaatggaatatgtgtgtcttctgatcaaaatcatttccgaggagaaattgaggaaaccatcactgaaagctttggtaatgatcatagcaccttggatgggtattccagaagaaccaccttgtcttcaaaaatgtatcacaccaaaggacaagaaggttctgtttgtctcaggtcatcagactgtgcctcaggattgtgttgtgatagacacttctggtccaagatctgtaaacctgtcctgaaagaaggtcaagtgtgtaccaagcataggagaaaaggctctcatggactagaaatattccagcgttgttactgtggagaaggtctgtcttgccggatacagaaagatcaccatcaagccagtaattcttctaggcttcacacttgtcagagacac

SEQ ID NO: 811 - protein, 266 aa, Homo sapiens
MMALGAAGATRVFVAMVAAALGGHPLLGVSATLNSVLNSNAIKNLPPPLGGAAGHPGSAVSAAPGILYPGGNKYQTIDNYQPYPCAEDEECGTDEYCASPTRGGDAGVQICLACRKRRKRCMRHAMCCPGNYCKNGICVSSDQNHFRGEIEETITESFGNDHSTLDGYSRRTTLSSKMYHTKGQEGSVCLRSSDCASGLCCDRHFWSKICKPVLKEGQVCTKHRRKGSHGLEIFQRCYCGEGLSCRIQKDHHQASNSSRLHTCQRH

SEQ ID NO: 812 - DNA, 816 bp, Mus musculus
atgatggttgtgtgtgcagcggcagctgtccggttcttggccgtgtttacaatgatggctctctgcagcctccctctgctaggagccagtgccaccttgaactcagttctcatcaattccaacgcgatcaagaacctgcccccaccgctgggtggtgctggggggcagccgggctctgctgtcagtgtggcgccgggagttctctatgagggcgggaacaagtaccagactcttgacaactaccagccctacccttgcgctgaagatgaggagtgcggctctgacgagtactgctccagccccagccgcggggcagccggcgtcggaggtgtacagatctgtctggcttgccgaaagcgcaggaagcgctgcatgaggcacgctatgtgctgccccgggaactactgcaaaaatggaatatgcatgccctctgaccacagccattttcctcgaggggagattgaggaaagcatcattgaaaaccttggtaatgaccacaacgccgccgcgggggatggatatcccagaagaaccacactgacttcaaaaatatatcacaccaaaggacaagaaggctccgtctgcctccgatcatcagactgtgccgcagggctgtgttgtgcaagacacttctggtccaagatctgtaaacctgtccttaaagaaggtcaggtgtgcaccaagcacaaacggaaaggctcccacgggctggagatattccagcgctgttactgcggggaaggcctggcttgcaggatacagaaagatcaccatcaagccagcaattcttctaggctccacacctgccagagacac

SEQ ID NO: 813 - protein, 272 aa, Mus musculus
MMVVCAAAAVRFLAVFTMMALCSLPLLGASATLNSVLINSNAIKNLPPPLGGAGGQPGSAVSVAPGVLYEGGNKYQTLDNYQPYPCAEDEECGSDEYCSSPSRGAAGVGGVQICLACRKRRKRCMRHAMCCPGNYCKNGICMPSDHSHFPRGEIEESIIENLGNDHNAAAGDGYPRRTTLTSKIYHTKGQEGSVCLRSSDCAAGLCCARHFWSKICKPVLKEGQVCTKHKRKGSHGLEIFQRCYCGEGLACRIQKDHHQASNSSRLHTCQRH

SEQ ID NO: 814 - DNA, 810 bp, Rattus rattus
atgacggttgtgcgtgcagtggcagctgtccggttcttggtcgtgcttacaacgatggctctctgcagcctccctccgctcggagtcagcgccactttgaactcagttctcatcaattccaacgcgatcaagaacctgcccccaccgctgggtggtgctggggggcagccgggctctgctgtcagcgtggcgcccggagtcctctatgagggcgggaacaagtaccagactcttgacaactaccagccctacccttgcgcggaggatgaggagtgcggcactgacgagtactgctccagtcccagccgcggggcagccggcgtgggaggtgtacaaatctgcctggcttgccgaaagcgcaggaaacgctgcatgaggcacgctatgtgctgccccgggaattactgcaaaaacggaatatgcatgccctctgaccacagccatttacctcgaggggaaatcgaggaaggcatcattgaaaaccttggcaatgaccacggtgccggggatggatatcccagaagaaccacactgacttcaaaaatatatcacaccaaagggcaagaaggctctgtctgcctccgatcatcagactgcgccacagggctgtgttgtgcaagacatttctggtccaagatctgtaaacctgtccttaaagaaggtcaggtatgcaccaagcacagaaggaaaggctcccacgggctggagatattccagcgctgttactgtggggaaggtctggcttgcaggatacagaaagatcaccatcaaaccagcaattcttccaggctccacacctgccagagacac

SEQ ID NO: 815 - protein, 270 aa, Rattus rattus
MTVVRAVAAVRFLVVLTTMALCSLPPLGVSATLNSVLINSNAIKNLPPPLGGAGGQPGSAVSVAPGVLYEGGNKYQTLDNYQPYPCAEDEECGTDEYCSSPSRGAAGVGGVQICLACRKRRKRCMRHAMCCPGNYCKNGICMPSDHSHLPRGEIEEGIIENLGNDHGAGDGYPRRTTLTSKIYHTKGQEGSVCLRSSDCATGLCCARHFWSKICKPVLKEGQVCTKHRRKGSHGLEIFQRCYCGEGLACRIQKDHHQTSNSSRLHTCQRH

SEQ ID NO: 816 - DNA, 798 bp, ARTIFICIAL SEQUENCE
  Cyno DKK-1
  CDS (1)..(798)
atgatggctctgggcgcagcaggagctgcccgggtcttggtcgcgctggtagcggcggctcttggcggccaccctctgctgggagtgagcgccaccttgaactcggttctcaattccaacgcgatcaagaacctgcccccaccgctgggcggcgctgcggggcacccaggctctgcagtcagcgccgcgccaggaattctgtacccgggcgggaataagtaccagaccattgacaactaccagccgtacccttgcgcagaggatgaggagtgcggcactgatgagtactgcgctagtcccacccgcggaggggacgcgggcgtgcaaatctgtctcgcctgcaggaagcgccgaaaacgctgcatgcgtcacgctatgtgctgccccgggaattactgcaaaaatggaatatgtgtgtcttctgatcaaaataatttccgaggggaaattgaggaaaccattactgaaagctttggtaatgatcatagcactttggatgggtattccagaagaacaacattgtcttcaaaaatgtatcacagcaaaggacaagaaggttctgtgtgtctccggtcatcagactgtgccacaggactgtgttgtgctagacacttctggtccaagatctgtaaacctgtcctcaaagaaggtcaagtgtgtaccaagcatagaagaaaaggctctcatgggctagaaatattccagcgttgttactgcggagaaggtctgtcttgccggatacagaaagatcaccatcaagccagtaattcttctaggcttcacacttgtcagagacac

SEQ ID NO: 817 - protein, 266 aa, ARTIFICIAL SEQUENCE
  Synthetic Construct
MMALGAAGAARVLVALVAAALGGHPLLGVSATLNSVLNSNAIKNLPPPLGGAAGHPGSAVSAAPGILYPGGNKYQTIDNYQPYPCAEDEECGTDEYCASPTRGGDAGVQICLACRKRRKRCMRHAMCCPGNYCKNGICVSSDQNNFRGEIEETITESFGNDHSTLDGYSRRTTLSSKMYHSKGQEGSVCLRSSDCATGLCCARHFWSKICKPVLKEGQVCTKHRRKGSHGLEIFQRCYCGEGLSCRIQKDHHQASNSSRLHTCQRH

SEQ ID NO: 818 - protein, 103 aa, Homo sapiens
  MISC_FEATURE: DKK-1 mAbs 11H10Hu VH
EIVLTQSPATLSLSPGERATLSCRASQWVSSYLAWYQQKPGQAPRLLIYDASNRATGIPARFSGSGSGTDFTLTISSLEPEDFAVYYCAWQEFFGQGTKLEIK

SEQ ID NO: 819 - protein, 120 aa, Homo sapiens
  MISC_FEATURE: DKK-1 mAbs 11H10Hu VL CDR1
EVQLVQSGGGLVQPGGSLRLSCTASGFTFSNHWIHWVRQAPGKGLEWVSGINWNSGSRGYSDSVKGRFTISRDNAKNSLYLQMNSLRAEDTAVYYCARERPVATGAFDIWGQGTTVTVSS

SEQ ID NO: 820 - protein, 11 aa, Homo sapiens
  MISC_FEATURE: DKK-1 mAbs 11H10Hu VL CDR2
RASQWVSSYLA

SEQ ID NO: 821 - protein, 7 aa, Homo sapiens
  MISC_FEATURE: DKK-1 mAbs 11H10Hu VL CDR3
DASNRAT

SEQ ID NO: 822 - protein, 5 aa, Homo sapiens
  MISC_FEATURE: DKK-1 mAbs 11H10Hu VH CDR1
AWQEF

SEQ ID NO: 823 - protein, 5 aa, Homo sapiens
NHWIH

SEQ ID NO: 824 - protein, 17 aa, Homo sapiens
  MISC_FEATURE: DKK-1 mAbs 11H10Hu VH CDR2
GINWNSGSRGYSDSVKG

SEQ ID NO: 825 - protein, 11 aa, Homo sapiens
  MISC_FEATURE: DKK-1 mAbs 11H10Hu VH CDR3
ERPVATGAFDI

SEQ ID NO: 826 - protein, 107 aa, Rattus norvegicus
  MISC_FEATURE: DKK-1 mAbs 11H10Rat VL
DIRMTQSPASLSASLGETVNIECLASEDIYSDLAWYQQKPGKSPQLLIYNANSLQNGVPSRFSGSGSGTQYSLKINSLQSEDVATYFCQQYNNYPPTFGGGTKLELK

SEQ ID NO: 827 - protein, 120 aa, Rattus norvegicus
  MISC_FEATURE: DKK-1 mAbs 11H10Rat VH
EVQLVESGGGLVQPANSLKLSCAASGFTFSDYAMAWVRQSPKKGLEWVATIIYDGSSTYYRDSVKGRFTISRDNAKSTLYLQMDSLRSEDTATYYCATGLGIATDYFDYWGQGVLVTVSS

SEQ ID NO: 828 - protein, 11 aa, Rattus norvegicus
  MISC_FEATURE: DKK-1 mAbs 11H10Rat VL CDR1
LASEDIYSDLA

SEQ ID NO: 829 - protein, 7 aa, Rattus norvegicus
  MISC_FEATURE: DKK-1 mAbs 11H10Rat VL CDR2
NANSLQN

SEQ ID NO: 830 - protein, 9 aa, Rattus norvegicus
  MISC_FEATURE: DKK-1 mAbs 11H10Rat VL CDR3
QQYNNYPPT

SEQ ID NO: 831 - protein, 5 aa, Rattus norvegicus
  MISC_FEATURE: DKK-1 mAbs 11H10Rat VH CDR1
DYAMA

SEQ ID NO: 832 - protein, 17 aa, Rattus norvegicus
  MISC_FEATURE: DKK-1 mAbs 11H10Rat VH CDR2
TIIYDGSSTYYRDSVKG

SEQ ID NO: 833 - protein, 11 aa, Rattus norvegicus
  MISC_FEATURE: DKK-1 mAbs 11H10Rat VH CDR3
GLGIATDYFDY

SEQ ID NO: 834 - protein, 107 aa, Homo sapiens
  MISC_FEATURE: DKK-1 mAbs 2.4.1 VL
DIQMTQSPSSLSASVGDRVTITCRASQGIRDDLGWFQQKPGKAPKRLIYAASSLQSGVPSRFSGSGSGTEFTLTISSLQPEDFATYYCLQHNSYPCSFGQGTKLEFK

SEQ ID NO: 835 - protein, 124 aa, Homo sapiens
  MISC_FEATURE: DKK-1 mAbs 2.4.1 VH
QVQLMQSGAEVKKPGASVKVSCKASGYTFTSYGISWVRQAPGQGLEWMGWISADNGHTNYAQKLQGRVTMTTDTSTSTAYMELRSLRSDDTAVYYCARDGELLNYYYYYGMDVWGQGTTVTVSS

SEQ ID NO: 836 - protein, 11 aa, Homo sapiens
  MISC_FEATURE: DKK-1 mAbs 2.4.1 VL CDR1
RASQGIRDDLG

SEQ ID NO: 837 - protein, 7 aa, Homo sapiens
  MISC_FEATURE: DKK-1 mAbs 2.4.1 VL CDR2
AASSLQS

SEQ ID NO: 838 - protein, 9 aa, Homo sapiens
  MISC_FEATURE: DKK-1 mAbs 2.4.1 VL CDR3
LQHNSYPCS

SEQ ID NO: 839 - protein, 5 aa, Homo sapiens
  MISC_FEATURE: DKK-1 mAbs 2.4.1 VH CDR1
SYGIS

SEQ ID NO: 840 - protein, 17 aa, Homo sapiens
  MISC_FEATURE: DKK-1 mAbs 2.4.1 VH CDR2
WISADNGHTNYAQKLQG

SEQ ID NO: 841 - protein, 15 aa, Homo sapiens
  MISC_FEATURE: DKK-1 mAbs 2.4.1 VH CDR3
DGELLNYYYYYGMDV

SEQ ID NO: 842 - protein, 112 aa, Homo sapiens
  MISC_FEATURE: DKK-1 mAbs 2.20.1 VL
DIVMTQTPLSLSVIPGQPASISCKSSQSLLHSDGKTYLYWYLQRPGQPPQLLIYEVSNRFSGVPHRLSGSGSGTDFTLKISRVEAEDVGVYYCMQSIQVPWTFGQGTKVEIK

SEQ ID NO: 843 - protein, 119 aa, Homo sapiens
  MISC_FEATURE: DKK-1 mAbs 2.20.1 VH
QVQLVESGGGVVQPGRSLRLSCAASGFTFSSYGMHWVRQAPGKGLEWVAVISYDGSDKYYADSVKGRFTISRDNSKNTLYLQMNSLRAEDTAVYYCARDQWGGSPAGPWGQGTLVTVSS

SEQ ID NO: 844 - protein, 16 aa, Homo sapiens
  MISC_FEATURE: DKK-1 mAbs 2.20.1 VL CDR1
KSSQSLLHSDGKTYLY

SEQ ID NO: 845 - protein, 7 aa, Homo sapiens
  MISC_FEATURE: DKK-1 mAbs 2.20.1 VL CDR2
EVSNRFS

SEQ ID NO: 846 - protein, 9 aa, Homo sapiens
  MISC_FEATURE: DKK-1 mAbs 2.20.1 VL CDR3
MQSIQVPWT

SEQ ID NO: 847 - protein, 5 aa, Homo sapiens
  MISC_FEATURE: DKK-1 mAbs 2.20.1 VH CDR1
SYGMH

SEQ ID NO: 848 - protein, 17 aa, Homo sapiens
  MISC_FEATURE: DKK-1 mAbs 2.20.1 VH CDR2
VISYDGSDKYYADSVKG

SEQ ID NO: 849 - protein, 10 aa, Homo sapiens
  MISC_FEATURE: DKK-1 mAbs 2.20.1 VH CDR3
DQWGGSPAGP

SEQ ID NO: 850 - protein, 108 aa, Homo sapiens
  MISC_FEATURE: DKK-1 mAbs 2.37.1 VL
EIVLTQSPGTLSLSPGERATLSCRASQSVSSNYLAWYQQKPGQAPRLLIYGASSRATGIPDRFSGSGSGTDFTLTISRLEPEDFAVYYCQQYGSSPITFGQGTRLEIK

SEQ ID NO: 851 - protein, 119 aa, Homo sapiens
  MISC_FEATURE: DKK-1 mAbs 2.37.1 VH
QVQLVESGGGVVQPGRSLRLSCAASGFTFSSYGMHWVRQAPGKGLEWVAVISYDGSDKYYADSVKGRFTFSRDNSKNTLYLQMNSLRAEDTAVYYCARELGIAASFDYWGQGTLVTVSS

SEQ ID NO: 852 - protein, 12 aa, Homo sapiens
  MISC_FEATURE: DKK-1 mAbs 2.37.1 VL CDR1
RASQSVSSNYLA

SEQ ID NO: 853 - protein, 7 aa, Homo sapiens
  MISC_FEATURE: DKK-1 mAbs 2.37.1 VL CDR2
GASSRAT

SEQ ID NO: 854 - protein, 9 aa, Homo sapiens
  MISC_FEATURE: DKK-1 mAbs 2.37.1 VL CDR3
QQYGSSPIT

SEQ ID NO: 855 - protein, 5 aa, Homo sapiens
  MISC_FEATURE: DKK-1 mAbs 2.37.1 VH CDR1
SYGMH

SEQ ID NO: 856 - protein, 17 aa, Homo sapiens
  MISC_FEATURE: DKK-1 mAbs 2.37.1 VH CDR2
VISYDGSDKYYADSVKG

SEQ ID NO: 857 - protein, 10 aa, Homo sapiens
  MISC_FEATURE: DKK-1 mAbs 2.37.1 VH CDR3
ELGIAASFDY

SEQ ID NO: 858 - protein, 112 aa, Homo sapiens
  MISC_FEATURE: DKK-1 mAbs 2.40.1 VL
DIVMTQSPLSLSVTPGQPASISCKSSQSLLHSDGKTYLYWYLQKPGQPPQLLIYEVSNRFSGVPDRFSGSGSGTDFTLKISRVEAEDVGVYYCMQSIQVPWTFGQGTKVEIK

SEQ ID NO: 859 - protein, 117 aa, Homo sapiens
  MISC_FEATURE: DKK-1 mAbs 2.40.1 VH
QVQLVESGGGVVQPGRSLRLSCAASGFTFSSYGMHWVRQAPGKGLGWVAVISYDGSDKYYADSVKGRFTISRDNSKNTLYLQMNSLRAEDTAVYYCARDLVDTAMPWGQGTTVTVSS

SEQ ID NO: 860 - protein, 16 aa, Homo sapiens
  MISC_FEATURE: DKK-1 mAbs 2.40.1 VL CDR1
KSSQSLLHSDGKTYLY

SEQ ID NO: 861 - protein, 7 aa, Homo sapiens
  MISC_FEATURE: DKK-1 mAbs 2.40.1 VL CDR2
EVSNRFS

SEQ ID NO: 862 - protein, 9 aa, Homo sapiens
  MISC_FEATURE: DKK-1 mAbs 2.40.1 VL CDR3
MQSIQVPWT

SEQ ID NO: 863 - protein, 5 aa, Homo sapiens
  MISC_FEATURE: DKK-1 mAbs 2.40.1 VH CDR1
SYGMH

SEQ ID NO: 864 - protein, 17 aa, Homo sapiens
  MISC_FEATURE: DKK-1 mAbs 2.40.1 VH CDR2
VISYDGSDKYYADSVKG

SEQ ID NO: 865 - protein, 8 aa, Homo sapiens
  MISC_FEATURE: DKK-1 mAbs 2.40.1 VH CDR3
DLVDTAMP

SEQ ID NO: 866 - protein, 112 aa, Homo sapiens
  MISC_FEATURE: DKK-1 mAbs 2.41.1 VL
DIVMTQTPLSLSVTPGQPASISCKSSQSLLHSDGKTYLYWYLQKPGQPPQLLIYEVSNRFSGVPDRFSGSGSGTDFTLKISRVEAEDVGVYYCMQSKQLPFTFGPGTKVDIK

SEQ ID NO: 867 - protein, 122 aa, Homo sapiens
  MISC_FEATURE: DKK-1 mAbs 2.41.1 VH
QVQLVESGGGVVQPGRSLRLSCAASGFTFSSYGMHWVRQAPGKGLEWVAVISYDGSDKYYADSVKGRFTISRDNSKNTLYLQMNSLRAEDTAVYYCARAGYSLYYYYGMDVWGQGTTVTVSS

SEQ ID NO: 868 - protein, 16 aa, Homo sapiens
  MISC_FEATURE: DKK-1 mAbs 2.41.1 VL CDR1
KSSQSLLHSDGKTYLY

SEQ ID NO: 869 - protein, 7 aa, Homo sapiens
  MISC_FEATURE: DKK-1 mAbs 2.41.1 VL CDR2
EVSNRFS

SEQ ID NO: 870 - protein, 9 aa, Homo sapiens
  MISC_FEATURE: DKK-1 mAbs 2.41.1 VL CDR3
MQSKQLPFT

SEQ ID NO: 871 - protein, 5 aa, Homo sapiens
  MISC_FEATURE: DKK-1 mAbs 2.41.1 VH CDR1
SYGMH

SEQ ID NO: 872 - protein, 17 aa, Homo sapiens
  MISC_FEATURE: DKK-1 mAbs 2.41.1 VH CDR2
VISYDGSDKYYADSVKG

SEQ ID NO: 873 - protein, 13 aa, Homo sapiens
  MISC_FEATURE: DKK-1 mAbs 2.41.1 VH CDR3
AGYSLYYYYGMDV

SEQ ID NO: 874 - protein, 113 aa, Homo sapiens
  MISC_FEATURE: DKK-1 mAbs 2.47.1 VL
DIVMTQTPLSLPVTPGEPASISCRSSQSLLDSDDGDTYLDWYLQKPGQSPQLLIYTLSYRASGVPDRFSGSGSGTDFTLKISRVEAEDVGVYYCMQRIEFPFTFGPGTKVDIK

SEQ ID NO: 875 - protein, 127 aa, Homo sapiens
  MISC_FEATURE: DKK-1 mAbs 2.47.1 VH
QVQLQESGPGLVKPSQTLSLTCTVSGGSISSGGYYWSWIRQHPGKGLEWIGDIYYSGSTYYNPSLKSRVTISVDTSKNQFSLKLSSVTAADTAVYYCARDRAYGDYGGDYYYGMDVWGQGTTVTVSS

SEQ ID NO: 876 - protein, 17 aa, Homo sapiens
  MISC_FEATURE: DKK-1 mAbs 2.47.1 VL CDR1
RSSQSLLDSDDGDTYLD

SEQ ID NO: 877 - protein, 7 aa, Homo sapiens
  MISC_FEATURE: DKK-1 mAbs 2.47.1 VL CDR2
TLSYRAS

SEQ ID NO: 878 - protein, 14 aa, Homo sapiens
  MISC_FEATURE: DKK-1 mAbs 2.47.1 VL CDR3
MQRIEFPMQRIEFP

SEQ ID NO: 879 - protein, 7 aa, Homo sapiens
  MISC_FEATURE: DKK-1 mAbs 2.47.1 VH CDR1
SGGYYWS

SEQ ID NO: 880 - protein, 16 aa, Homo sapiens
  MISC_FEATURE: DKK-1 mAbs 2.47.1 VH CDR2
DIYYSGSTYYNPSLKS

SEQ ID NO: 881 - protein, 17 aa, Homo sapiens
  MISC_FEATURE: DKK-1 mAbs 2.47.1 VH CDR3
DRAYGDYGGDYYYGMDV

SEQ ID NO: 882 - protein, 107 aa, Homo sapiens
  MISC_FEATURE: DKK-1 mAbs 5.17.1 VL
DIQMTQSPSSLSASVGDRVTITCQASQDINNYLNWYQQKPGKAPNLLIYDASNLETGVPSRFSGSGSGTDFTFTISSLQPADIATYYCQQYDDFPLTFGGGTKVEIK

SEQ ID NO: 883 - protein, 118 aa, Homo sapiens
  MISC_FEATURE: DKK-1 mAbs 5.17.1 VH
QVQLQESGPGLVKPSETLSLTCTVSGGSISSYYWSWIRQPPGKGLEWIGYIYYSGNTNYNPSLKSRVTISVDTSKNQFSLKLRSVTAADTAVYYCARYNWNNDLFDYWGQGTLVTVSS

SEQ ID NO: 884 - protein, 11 aa, Homo sapiens
  MISC_FEATURE: DKK-1 mAbs 5.17.1 VL CDR1
QASQDINNYLN

SEQ ID NO: 885 - protein, 7 aa, Homo sapiens
  MISC_FEATURE: DKK-1 mAbs 5.17.1 VL CDR2
DASNLET

SEQ ID NO: 886 - protein, 9 aa, Homo sapiens
  MISC_FEATURE: DKK-1 mAbs 5.17.1 VL CDR3
QQYDDFPLT

SEQ ID NO: 887 - protein, 5 aa, Homo sapiens
  MISC_FEATURE: DKK-1 mAbs 5.17.1 VH CDR1
SYYWS

SEQ ID NO: 888 - protein, 16 aa, Homo sapiens
  MISC_FEATURE: DKK-1 mAbs 5.17.1 VH CDR2
YIYYSGNTNYNPSLKS

SEQ ID NO: 889 - protein, 10 aa, Homo sapiens
  MISC_FEATURE: DKK-1 mAbs 5.17.1 VH CDR3
YNWNNDLFDY

SEQ ID NO: 890 - protein, 107 aa, Homo sapiens
  MISC_FEATURE: DKK-1 mAbs 5.23.1 VL
DIQMTQSPSSLSASVGDRVTITCQASQDISNYLNWYQQKPGKAPKLLIYDASNLETGVPSRFSGSGSGTDFTFTISSLQPEDIATYYCQQYDNLPLTFGGGTKVEIK

SEQ ID NO: 891 - protein, 126 aa, Homo sapiens
  MISC_FEATURE: DKK-1 mAbs 5.23.1 VH
QVQLVESGGGVVQPGRSLRLSCAASGFTFSSYGMHWVRQAPGKGLEWVAVIWCDGSNKYYADSVKGRFTISRDSSKNTLYLQMNSLRAEDTAVYYCARGGYGSGSYEDYYYGMDVWGQGTTVTVSS

SEQ ID NO: 892 - protein, 11 aa, Homo sapiens
  MISC_FEATURE: DKK-1 mAbs 5.23.1 VL CDR1
QASQDISNYLN

SEQ ID NO: 893 - protein, 7 aa, Homo sapiens
  MISC_FEATURE: DKK-1 mAbs 5.23.1 VL CDR2
DASNLET

SEQ ID NO: 894 - protein, 9 aa, Homo sapiens
  MISC_FEATURE: DKK-1 mAbs 5.23.1 VL CDR3
QQYDNLPLT

SEQ ID NO: 895 - protein, 5 aa, Homo sapiens
  MISC_FEATURE: DKK-1 mAbs 5.23.1 VH CDR1
SYGMH

SEQ ID NO: 896 - protein, 17 aa, Homo sapiens
  MISC_FEATURE: DKK-1 mAbs 5.23.1 VH CDR2
VIWCDGSNKYYADSVKG

SEQ ID NO: 897 - protein, 17 aa, Homo sapiens
  MISC_FEATURE: DKK-1 mAbs 5.23.1 VH CDR3
GGYGSGSYEDYYYGMDV

SEQ ID NO: 898 - protein, 107 aa, Homo sapiens
  MISC_FEATURE: DKK-1 mAbs 5.25.1 VL
DIQMTQSPSSLSASVGDRVTITCQASQDISKDLNWYQQKPGKAPRLLIYDASNLETGVPSRFSGSGSGTDFTFTISSLQPEDIATFYCQQYDHLPIAFGQGTRLEIK

SEQ ID NO: 899 - protein, 119 aa, Homo sapiens
  MISC_FEATURE: DKK-1 mAbs 5.25.1 VH
QVQLVQSGAEVKKPGASVKVSCKASGYTFTSYDINWVRQATGQGLEWMGWMDPNSGNTGYAQKFQGRVTMTRNTSISTAFMELSSLRSEDTAVYYCARTDYFYFGMDVWGQGTTVTVSS

SEQ ID NO: 900 - protein, 11 aa, Homo sapiens
  MISC_FEATURE: DKK-1 mAps 5.25.1 VL CDR1
QASQDISKDLN

SEQ ID NO: 901 - protein, 7 aa, Homo sapiens
  MISC_FEATURE: DKK-1 mAbs 5.25.1 VL CDR2
DASNLET

SEQ ID NO: 902 - protein, 9 aa, Homo sapiens
  MISC_FEATURE: DKK-1 mAbs 5.25.1 VL CDR3
QQYDNLPLT

SEQ ID NO: 903 - protein, 5 aa, Homo sapiens
  MISC_FEATURE: DKK-1 mAbs 5.25.1 VH CDR1
SYGMH

SEQ ID NO: 904 - protein, 17 aa, Homo sapiens
  MISC_FEATURE: DKK-1 mAbs 5.25.1 VH CDR2
WMDPNSGNTGYAQKFQG

SEQ ID NO: 905 - protein, 10 aa, Homo sapiens
  MISC_FEATURE: DKK-1 mAbs VH CDR3
TDYFYFGMDV

SEQ ID NO: 906 - protein, 107 aa, Homo sapiens
  MISC_FEATURE: DKK-1 mAbs 5.31.1 VL
DIQVTQSPSSLSASVGDRVTITCQASQDISNYLNWYQQKPGKAPKFLIYDASNLEAGVPSRFSGSGSGTDFTFTISSLQPEDIATYYCQQYDNLPLTFGGGTKVEIK

SEQ ID NO: 907 - protein, 125 aa, Homo sapiens
  MISC_FEATURE: DKK-1 mAbs 5.31.1 VH
QVQLVESGGGVVQPGRSLRLSCAASGFTFSSYGMHWVRQAPGKGLEWVAVIWYDGRNKYYADSVKGRFTISRDNSKNTLYLQMNSLRAEDTAVYYCARGGGAVADYNYYYGMDVWGQGTTVTVSS

SEQ ID NO: 908 - protein, 11 aa, Homo sapiens
  MISC_FEATURE: DKK-1 mAbs 5.31.1 VL CDR1
QASQDISNYLN

SEQ ID NO: 909 - protein, 7 aa, Homo sapiens
  MISC_FEATURE: DKK-1 mAbs 5.31.1 VL CDR2
DASNLEA

SEQ ID NO: 910 - protein, 9 aa, Homo sapiens
  MISC_FEATURE: DKK-1 mAbs 5.31.1 VL CDR3
QQYDNLPLT

SEQ ID NO: 911 - protein, 5 aa, Homo sapiens
  MISC_FEATURE: DKK-1 mAbs 5.31.1 VH CDR1
SYGMH

SEQ ID NO: 912 - protein, 17 aa, Homo sapiens
  MISC_FEATURE: DKK-1 mAbs 5.31.1 VH CDR2
VIWYDGRNKYYADSVKG

SEQ ID NO: 913 - protein, 16 aa, Homo sapiens
  MISC_FEATURE: DKK-1 mAbs 5.31.1 VH CDR3
GGGAVADYNYYYGMDV

SEQ ID NO: 914 - protein, 107 aa, Homo sapiens
  MISC_FEATURE: DKK-1 mAbs 5.32.1 VL
DIQMTQSPSSLSASVGDRVTITCQASQDISKDLNWYQQKPGKAPKLLIYDASNLETGVPSRFSGSGSGTDFTFTISSLQPEDIATYYCQQYDDLPITFGQGTRLEIK

SEQ ID NO: 915 - protein, 119 aa, Homo sapiens
  MISC_FEATURE: DKK-1 mAbs 5.32.1 VH
QVQLVQSGAEVKKPGASVKVSCKASGFTFTSYDISWVRQATGLGLEWMGWMNPSSGYTGYAQNFQGRVTMTWNTSISTVYMELSSLRSEDTAVYYCARTDYYYYGMDVWGRGTTVTVSS

SEQ ID NO: 916 - protein, 11 aa, Homo sapiens
  MISC_FEATURE: DKK-1 mAbs 5.32.1 VL CDR1
QASQDISKDLN

SEQ ID NO: 917 - protein, 7 aa, Homo sapiens
  MISC_FEATURE: DKK-1 mAbs 5.32.1 VL CDR2
DASNLET

SEQ ID NO: 918 - protein, 9 aa, Homo sapiens
  MISC_FEATURE: DKK-1 mAbs 5.32.1 VL CDR3
QQYDDLPIT

SEQ ID NO: 919 - protein, 5 aa, Homo sapiens
  MISC_FEATURE: DKK-1 mAbs 5.32.1 VH CDR1
SYDIS

SEQ ID NO: 920 - protein, 17 aa, Homo sapiens
  MISC_FEATURE: DKK-1 mAbs 5.32.1 VH CDR2
WMNPSSGYTGYAQNFQG

SEQ ID NO: 921 - protein, 10 aa, Homo sapiens
  MISC_FEATURE: DKK-1 mAbs 5.32.1 VH CDR3
TDYYYYGMDV

SEQ ID NO: 922 - protein, 107 aa, Homo sapiens
  MISC_FEATURE: DKK-1 mAbs 5.40.1 VL
DIRLTQSPSSLSASVGDRVTITCQASQDISNYLNWYQQEPGKAPKLLIYDASNLETGVPSRFSGSGSGTDFTFTISSLQPEDIATYYCQQYDNFPLTFGGGTKVEIK

SEQ ID NO: 923 - protein, 118 aa, Homo sapiens
  MISC_FEATURE: DKK-1 mAbs 5.40.1 VH
QVLLQESGPGLVKPSETLSLTCTVSGGSISSYYWSWIRQTPGKGLEWIGYVYYSGSTSYNPSLKSRVTISMYTSKTEFSLKLSSVTAADTAVYYCARYNWNNDLFDYWGQGTLVTVSS

SEQ ID NO: 924 - protein, 11 aa, Homo sapiens
  MISC_FEATURE: DKK-1 mAbs 5.40.1 VL CDR1
QASQDISNYLN

SEQ ID NO: 925 - protein, 7 aa, Homo sapiens
  MISC_FEATURE: DKK-1 mAbs 5.40.1 VL CDR2
DASNLET

SEQ ID NO: 926 - protein, 9 aa, Homo sapiens
  MISC_FEATURE: DKK-1 mAbs 5.40.1 VL CDR3
QQYDNFPLT

SEQ ID NO: 927 - protein, 5 aa, Homo sapiens
  MISC_FEATURE: DKK-1 mAbs 5.40.1 VH CDR1
SYYWS

SEQ ID NO: 928 - protein, 16 aa, Homo sapiens
  MISC_FEATURE: DKK-1 mAbs 5.40.1 VH CDR2
YVYYSGSTSYNPSLKS

SEQ ID NO: 929 - protein, 10 aa, Homo sapiens
  MISC_FEATURE: DKK-1 mAbs 5.40.1 VH CDR3
YNWNNDLFDY

SEQ ID NO: 930 - protein, 108 aa, Homo sapiens
  MISC_FEATURE: DKK-1 mAbs 5.65.1 VL
SYVLTQPPSVSVAPGQTARITCGGNNIGSKSVHWYQQKPGQAPVLVVYDDSDRPSGIPERFSGSNSGNTATLTISRVEAGDEADYYCQVLDSSSDHVIFGGGTKLTVL

SEQ ID NO: 931 - protein, 120 aa, Homo sapiens
  MISC_FEATURE: DKK-1 mAbs 5.65.1 VH
EVQLLESGGGLVQPGGSLRLSCAASGFTSGNYAMSWVRQAPGKGLEWVSAISGGGGTTYYADSVEGRFTISRDNSKNTLYLQLNSLRAEDTAVYYCAKEFGELEPRFDYWGQGTLVTVSS

SEQ ID NO: 932 - protein, 11 aa, Homo sapiens
  MISC_FEATURE: DKK-1 mAbs 5.65.1 VL CDR1
GGNNIGSKSVH

SEQ ID NO: 933 - protein, 7 aa, Homo sapiens
  MISC_FEATURE: DKK-1 mAbs 5.65.1 VL CDR2
DDSDRPS

SEQ ID NO: 934 - protein, 11 aa, Homo sapiens
  MISC_FEATURE: DKK-1 mAbs 5.65.1 VL CDR3
QVLDSSSDHVI

SEQ ID NO: 935 - protein, 5 aa, Homo sapiens
  MISC_FEATURE: DKK-1 mAbs 5.65.1 VH CDR1
NYAMS

SEQ ID NO: 936 - protein, 17 aa, Homo sapiens
  MISC_FEATURE: DKK-1 mAbs 5.65.1 VH CDR2
AISGGGGTTYYADSVEG

SEQ ID NO: 937 - protein, 11 aa, Homo sapiens
  MISC_FEATURE: DKK-1 mAbs 5.65.1 VH CDR3
EFGELEPRFDY

SEQ ID NO: 938 - protein, 108 aa, Homo sapiens
  MISC_FEATURE: DKK-1 mAbs 5.76.1 VL
SYVLTQPPSVSVAPGQTARITCGGNNIGSESVHWYQQKPGQAPVLVVYDDSDRPSGIPERFSGSNSGNTATLTISRVEAGDEADYYCQVWDSSNDHVVFGGGTKLTVL

SEQ ID NO: 939 - protein, 124 aa, Homo sapiens
  MISC_FEATURE: DKK-1 mABs 5.76.1 VH
QLQLQESGPGLVKPSETLSLTCTVSGGSISSSNYYWGWIRQPPGKGLEWIGTIYYSGSTYYTPSLKSRVTISVDTSKNQFSLKLSSVTAADTAVYYCARERAIAVAAIVFFDYWGQGTLVTVSS

SEQ ID NO: 940 - protein, 11 aa, Homo sapiens
  MISC_FEATURE: DKK-1 mAbs 5.76.1 VL CDR1
GGNNIGSESVH

SEQ ID NO: 941 - protein, 7 aa, Homo sapiens
  MISC_FEATURE: DKK-1 mAbs 5.76.1 VL CDR2
DDSDRPS

SEQ ID NO: 942 - protein, 11 aa, Homo sapiens
  MISC_FEATURE: DKK-1 mAbs 5.76.1 VL CDR3
QVWDSSNDHVV

SEQ ID NO: 943 - protein, 7 aa, Homo sapiens
  MISC_FEATURE: DKK-1 mAbs 5.76.1 VH CDR1
SSNYYWG

SEQ ID NO: 944 - protein, 16 aa, Homo sapiens
  MISC_FEATURE: DKK-1 mAbs 5.76.1 VH CDR2
TIYYSGSTYYTPSLKS

SEQ ID NO: 945 - protein, 14 aa, Homo sapiens
  MISC_FEATURE: DKK-1 mAbs 5.76.1 VH CDR3
ERAIAVAAIVFFDY

SEQ ID NO: 946 - protein, 103 aa, Homo sapiens
  MISC_FEATURE: DKK-1 mAbs 5.77.1 VL
QSPSVSVAPGQTARITCGGNNIGSKSVHWYQQKPGQAPVLVVYDDSDRPSGIPERFSGSNSGNTATLTISRVEAGDEADYYCQVWDSSSDHWVFGGGTKLTVL

SEQ ID NO: 947 - protein, 123 aa, Homo sapiens
  MISC_FEATURE: DKK-1 mAbs 5.77.1 VH
QVQLVQSGAEVKKPGASVKVSCKASGYTFTSYDINWVRQATGQGLEWMGWMNLNSDNTGYAQKFQGRVTMTRNTSISTAYMELSSLRSEDTAVYYCASIAARRDYNYYGMDVWGQGTKVTVSS

SEQ ID NO: 948 - protein, 11 aa, Homo sapiens
  MISC_FEATURE: DKK-1 mAbs 5.77.1 VL CDR1
GGNNIGSKSVH

SEQ ID NO: 949 - protein, 7 aa, Homo sapiens
  MISC_FEATURE: DKK-1 mAbs 5.77.1 VL CDR2
DDSDRPS

SEQ ID NO: 950 - protein, 11 aa, Homo sapiens
  MISC_FEATURE: DKK-1 mAbs  5.77.1 VL CDR3
QVWDSSSDHWV

SEQ ID NO: 951 - protein, 5 aa, Homo sapiens
  MISC_FEATURE: DKK-1 mAbs 5.77.1 VH CDR1
SYDIN

SEQ ID NO: 952 - protein, 17 aa, Homo sapiens
  MISC_FEATURE: DKK-1 mAbs 5.77.1 VH CDR2
WMNLNSDNTGYAQKFQG

SEQ ID NO: 953 - protein, 14 aa, Homo sapiens
  MISC_FEATURE: DKK-1 mAbs 5.77.1 VH CDR3
IAARRDYNYYGMDV

SEQ ID NO: 954 - protein, 107 aa, Homo sapiens
  MISC_FEATURE: DKK-1 mAbs 5.78.1 VL
EIVLTQSPGTLSVSPGERATLSCRASQSVSSSYLAWYQQKPGQAPRLLIYGASGRATGIPDRFSGSGSGTDFILTISRLEPEDFAVYYCQQYGSSFTFGGGTKVEIK

SEQ ID NO: 955 - protein, 125 aa, Homo sapiens
  MISC_FEATURE: DKK-1 mAbs 5.78.1 VH
QVQLVESGGGVVQPGRSLRLSCAASGFTFSSYGMHWVRQAPGKGLEWVAVILYDGSDNYYADSVKGRFTISRDNSKNTLYLQMNSLRAEDTAVYYCAREGIAVAGDYYYYGMDVWGQGTTVTVSS

SEQ ID NO: 956 - protein, 12 aa, Homo sapiens
  MISC_FEATURE: DKK-1 mAbs 5.78.1 VL CDR1
RASQSVSSSYLA

SEQ ID NO: 957 - protein, 7 aa, Homo sapiens
  MISC_FEATURE: DKK-1 mAbs 5.78.1 VL CDR2
GASGRAT

SEQ ID NO: 958 - protein, 8 aa, Homo sapiens
  MISC_FEATURE: DKK-1 mAbs 5.78.1 VL CDR3
QQYGSSFT

SEQ ID NO: 959 - protein, 5 aa, Homo sapiens
  MISC_FEATURE: DKK-1 mAbs 5.78.1 VH CDR1
SYGMH

SEQ ID NO: 960 - protein, 17 aa, Homo sapiens
  MISC_FEATURE: DKK-1 mAbs 5.78.1 VH CDR2
VILYDGSDNYYADSVKG

SEQ ID NO: 961 - protein, 16 aa, Homo sapiens
  MISC_FEATURE: DKK-1 mAbs 5.78.1 VH CDR3
EGIAVAGDYYYYGMDV

SEQ ID NO: 962 - protein, 112 aa, Homo sapiens
  MISC_FEATURE: DKK-1 mAbs 5.80.1 VL
QSVLTQPPSVSGAPGQRVTISCTGSSSNIGADYDVHWYQQLPGTAPKLLIYDYSNRPSGVPDRFSGSKSGTSASLAITGLQAEDEADYYCQSYDNSLSGYVVFGGGTKLTVL

SEQ ID NO: 963 - protein, 116 aa, Homo sapiens
  MISC_FEATURE: DKK-1 mAbs 5.80.1 VH
EVQLVQSGAEVKKPGESLKISCKGSGYSFTSYWIGWVRQMPGKGLEWMGIIYPGDSDTRYSPSFQGQVTISADKSISTAYLQWSSLTASDTAMYYCARQGESFDYWGQGTLVTVSS

SEQ ID NO: 964 - protein, 14 aa, Homo sapiens
  MISC_FEATURE: DKK-1 mAbs 5.80.1 VL CDR1
TGSSSNIGADYDVH

SEQ ID NO: 965 - protein, 7 aa, Homo sapiens
  MISC_FEATURE: DKK-1 mAbs 5.80.1 VL CDR2
DYSNRPS

SEQ ID NO: 966 - protein, 12 aa, Homo sapiens
  MISC_FEATURE: DKK-1 mAbs 5.80.1 VL CDR3
QSYDNSLSGYVV

SEQ ID NO: 967 - protein, 5 aa, Homo sapiens
  MISC_FEATURE: DKK-1 mAbs 5.80.1 VH CDR1
SYWIG

SEQ ID NO: 968 - protein, 17 aa, Homo sapiens
  MISC_FEATURE: DKK-1 mAbs 5.80.1 VH CDR2
IIYPGDSDTRYSPSFQG

SEQ ID NO: 969 - protein, 7 aa, Homo sapiens
  MISC_FEATURE: DKK-1 mAbs 5.80.1 VH CDR3
QGESFDY

SEQ ID NO: 970 - protein, 110 aa, Homo sapiens
  MISC_FEATURE: DKK-1 mAbs 5.85.1 VL
QSVLTQPPSVSGAPGQRVTISCTGSSSNIGAGYDVHWYQQLPRTAPKLLIYGNSNRPSGVPDRFSDSKSGTSASLAITGLQAEDEADYYCQSYDSSLSVIFGGGTKLTVL

SEQ ID NO: 971 - protein, 116 aa, Homo sapiens
  MISC_FEATURE: DKK-1 mAbs 5.85.1 VH
EVQLVQSGAEVKKPGESLKISCKVSGYSFTTYWIGWVRQMPGKGLDWMGIIYPGDSDTRYSPSFQGQVTISADKSISTAYLQWSSLKASDTAMYYCARQGIAFDYWGQGTLVTVSS

SEQ ID NO: 972 - protein, 14 aa, Homo sapiens
  MISC_FEATURE: DKK-1 mAbs 5.85.1 VL CDR1
TGSSSNIGAGYDVH

SEQ ID NO: 973 - protein, 7 aa, Homo sapiens
  MISC_FEATURE: DKK-1 mAbs 5.85.1 VL CDR2
GNSNRPS

SEQ ID NO: 974 - protein, 10 aa, Homo sapiens
  MISC_FEATURE: DKK-1 mAbs 5.85.1 VL CDR3
QSYDSSLSVI

SEQ ID NO: 975 - protein, 5 aa, Homo sapiens
  MISC_FEATURE: DKK-1 mAbs 5.85.1 VH CDR1
TYWIG

SEQ ID NO: 976 - protein, 17 aa, Homo sapiens
  MISC_FEATURE: DKK-1 mAbs 5.85.1 VH CDR2
IIYPGDSDTRYSPSFQG

SEQ ID NO: 977 - protein, 7 aa, Homo sapiens
  MISC_FEATURE: DKK-1 mAbs 5.85.1 VH CDR3
QGIAFDY

SEQ ID NO: 978 - protein, 112 aa, Homo sapiens
  MISC_FEATURE: DKK-1 mAbs 6.37.5 VL
DIVMTQTPLSLSVTPGQPASISCKSGQSLLHSDGKTYLYWYLQKPGQPPQFLIYEVSNRFSRVPDRFSGSGSGTDFTLRISRVEAEDVGIYYCMQSIQLPWTFGQGTQVEIK

SEQ ID NO: 979 - protein, 114 aa, Homo sapiens
  MISC_FEATURE: DKK-1 mAbs 6.37.5 VH
QVQLVESGGGVVQPGRSLRLSCAASGFTFSGYGMHWVRQAPGKGLEWVAVISYDGNDKYYADSVKGRFTISRDNAKNTLYLQMNSLRAEDTAVYYCARELRVLWGQGTLVTVSS

SEQ ID NO: 980 - protein, 16 aa, Homo sapiens
  MISC_FEATURE: DKK-1 mAbs 6.37.5 VL CDR1
KSGQSLLHSDGKTYLY

SEQ ID NO: 981 - protein, 7 aa, Homo sapiens
  MISC_FEATURE: DKK-1 mAbs 6.37.5 VL CDR2
EVSNRFS

SEQ ID NO: 982 - protein, 9 aa, Homo sapiens
  MISC_FEATURE: DKK-1 mAbs 6.37.5 VL CDR3
MQSIQLPWT

SEQ ID NO: 983 - protein, 5 aa, Homo sapiens
  MISC_FEATURE: DKK-1 mAbs 6.37.5 VH CDR1
GYGMH

SEQ ID NO: 984 - protein, 17 aa, Homo sapiens
  MISC_FEATURE: DKK-1 mAbs 6.37.5 VH CDR2
VISYDGNDKYYADSVKG

SEQ ID NO: 985 - protein, 5 aa, Homo sapiens
  MISC_FEATURE: DDK-1 mAbs 6.37.5 VH CDR3
ELRVL

SEQ ID NO: 986 - protein, 112 aa, Homo sapiens
  MISC_FEATURE: DDK-1 mAbs 6.116.6 VL
DIVMTQTPLSLSVTPGQPASISCKSGQSLLHNDGKTYLYWYLQKPGQPPQFLIYEVSNRFSRVPDRFSGSGSGTDFTLKISRVEAEDVGIYYCMQSIQLPWTFGQGTQVEIK

SEQ ID NO: 987 - protein, 114 aa, Homo sapiens; identical to SEQ ID NO: 979
  MISC_FEATURE: DDK-1 mAbs 6.116.6 VH

SEQ ID NO: 988 - protein, 16 aa, Homo sapiens
  MISC_FEATURE: DKK-1 mAbs 6.116.6 VL CDR1
KSGQSLLHNDGKTYLY

SEQ ID NO: 989 - protein, 7 aa, Homo sapiens
  MISC_FEATURE: DKK-1 mAbs 6.116.6 VL CDR2
EVSNRFS

SEQ ID NO: 990 - protein, 9 aa, Homo sapiens
  MISC_FEATURE: DKK-1 mAbs 6.116.6 VL CDR3
MQSIQLPWT

SEQ ID NO: 991 - protein, 5 aa, Homo sapiens
  MISC_FEATURE: DKK-1 mAbs 6.116.6 VH CDR1
GYGMH

SEQ ID NO: 992 - protein, 17 aa, Homo sapiens
  MISC_FEATURE: DKK-1 mAbs 6.116.6 VH CDR2
VISYDGNDKYYADSVKG

SEQ ID NO: 993 - protein, 5 aa, Homo sapiens
  MISC_FEATURE: DKK-1 mAbs 6.116.6 VH CDR3
ELRVL

SEQ ID NO: 994 - protein, 112 aa, Homo sapiens
  MISC_FEATURE: DKK-1 mAbs 6.139.5 VL
DIVMTQTPLSLSVTPRQPASISCKSSQSLLHSDGKTYLYWYLQKPGQPPQFLIYEVSNRFSGVPDRFSGSGSGTDFTLKISRVEAEDVGVYYCMQSIQLPWTFGQGTKVEIK

SEQ ID NO: 995 - protein, 114 aa, Homo sapiens
  MISC_FEATURE: DKK-1 mAbs 6.139.5 VH
QVQLVESGGGVVQPGRSLRLSCAASGFTFSSYGMHWVRQAPGKGLEWVAVISYDGGDQYYADSVKGRFTISRDNSKNTLYLQMNSLRTEDTAEYYCARELRVLWGQGTLVTVSS

SEQ ID NO: 996 - protein, 13 aa, Homo sapiens
  MISC_FEATURE: DKK-1 mAbs 6.139.5 VL CDR1
AASGFTFSRYDMH

SEQ ID NO: 997 - protein, 12 aa, Homo sapiens
  MISC_FEATURE: DKK-1 mAbs 6.139.5 VL CDR2
IFYDGSNKYYAD

SEQ ID NO: 998 - protein, 9 aa, Homo sapiens
  MISC_FEATURE: DKK-1 mAbs 6.139.5 VL CDR3
ATLAAAFDY

SEQ ID NO: 999 - protein, 5 aa, Homo sapiens
  MISC_FEATURE: DKK-1 mAbs 6.139.5 VH CDR1
SYGMH

SEQ ID NO: 1000 - protein, 17 aa, Homo sapiens
  MISC_FEATURE: DKK-1 mAbs 6.139.5 VH CDR2
VISYDGGDQYYADSVKG

SEQ ID NO: 1001 - protein, 5 aa, Homo sapiens
  MISC_FEATURE: DKK-1 mAbs 6.139.5 VH CDR3
ELRVL

SEQ ID NO: 1002 - protein, 107 aa, Homo sapiens
  MISC_FEATURE: DKK-1 mAbs 6.147.4 VL
YVLTQPPSVSVAPGQTARITCGGNNIGSKSVHWYQQKPGQAPVLVVYDDSDRPSEIPERFSGSNSGNTATLTISRVEAGDEADYYCQVWDSSSDHVVFGGGTRLTVL

SEQ ID NO: 1003 - protein, 116 aa, Homo sapiens
  MISC_FEATURE: DKK-1 mAbs 6.147.4 VH
QVQLVESGGGVVQPGRSLRLSCAASGFTFSRYDMHWVRQAPGKGLEWVAIIFYDGSNKYYADPVKGRFTISRDNSKNTLYLQMNSLRAEDTAVYYCATLAAAFDYWGQGTLVTVSS

SEQ ID NO: 1004 - protein, 11 aa, Homo sapiens
  MISC_FEATURE: DKK-1 mAbs 6.147.4 VL CDR1
GGNNIGSKSVH

SEQ ID NO: 1005 - protein, 7 aa, Homo sapiens
  MISC_FEATURE: DKK-1 mAbs 6.147.4 VL CDR2
DDSDRPS

SEQ ID NO: 1006 - protein, 11 aa, Homo sapiens
  MISC_FEATURE: DKK-1 mAbs 6.147.4 VL CDR3
QVWDSSSDHVV

SEQ ID NO: 1007 - protein, 5 aa, Homo sapiens
  MISC_FEATURE: DKK-1 mAbs 6.147.4 VH CDR1
RYDMH

SEQ ID NO: 1008 - protein, 17 aa, Homo sapiens
  MISC_FEATURE: DKK-1 mAbs 6.147.4 VH CDR2
IIFYDGSNKYYADPVKG

SEQ ID NO: 1009 - protein, 7 aa, Homo sapiens
  MISC_FEATURE: DKK-1 mAbs 6.147.4 VH CDR3
LAAAFDY

SEQ ID NO: 1010 - protein, 110 aa, Homo sapiens
SYVLTQPPSVSVAPGQTARITCGGDNIGSISVHWYQQKPGQAPVLVVYDDSDRPSGIPERFSGSNSGNTATLTISWVEAGDEADYYCQVWDSSIDHPVLFGGGTKLTVLG

SEQ ID NO: 1011 - protein, 123 aa, Homo sapiens
EVQLVESGGGLVQPGGSLRLSCAASGFTFSSYDMHWVRQATGKGLEWVSAIGTAGDTYYAGSVKGRFTISRENAKNSLYLQMNSLRVGDTAVYYCARSWGEGNYYFYYGMDVWGQGTTVTVSS

SEQ ID NO: 1012 - protein, 11 aa, Homo sapiens
  MISC_FEATURE: 19D11 VL CDR1
GGDNIGSISVH

SEQ ID NO: 1013 - protein, 7 aa, Homo sapiens
  MISC_FEATURE: 19D11 VL CDR2
DDSDRPS

SEQ ID NO: 1014 - protein, 12 aa, Homo sapiens
  MISC_FEATURE: 19D11 VL CDR3
QVWDSSIDHPVL

SEQ ID NO: 1015 - protein, 5 aa, Homo sapiens
  MISC_FEATURE: 19D11 VH CDR1
SYDMH

SEQ ID NO: 1016 - protein, 16 aa, Homo sapiens
  MISC_FEATURE: 19D11 VH CDR2
AIGTAGDTYYAGSVKG

SEQ ID NO: 1017 - protein, 15 aa, Homo sapiens
  MISC_FEATURE: 19D11 VH CDR3
SWGEGNYYFYYGMDV

SEQ ID NO: 1018 - protein, 111 aa, Homo sapiens
QSALTQPASVSGSPGQSITISCTGTSSDVGGYNYVSWYQQHPGKAPKLMIYEVSYRPSGVSNRFSGSKSGSTASLTISGLQPEDEADYYCSSYAISSTLVFGGGTKMTVLG

SEQ ID NO: 1019 - protein, 118 aa, Homo sapiens
QVQLQESGPGLVKPSETLSLTCTVSGGSISSYYWSWIRQPPGKGLEWIGYISDSGSTNYNPSLKSRIPISVDTSKNQFSLKLSSVTAADTAVYYCARWQLAHDAFDIWGQGTMVTVSS

SEQ ID NO: 1020 - protein, 14 aa, Homo sapiens
  MISC_FEATURE: 20C3 VL CDR1
TGTSSDVGGYNYVS

SEQ ID NO: 1021 - protein, 7 aa, Homo sapiens
  MISC_FEATURE: 20C3 VL CDR2
EVSYRPS

SEQ ID NO: 1022 - protein, 10 aa, Homo sapiens
  MISC_FEATURE: 20C3 VL CDR3
SSYAISSTLV

SEQ ID NO: 1023 - protein, 5 aa, Homo sapiens
  MISC_FEATURE: 20C3 VH CDR1
SYYWS

SEQ ID NO: 1024 - protein, 16 aa, Homo sapiens
  MISC_FEATURE: 20C3 VH CDR2
YISDSGSTNYNPSLKS

SEQ ID NO: 1025 - protein, 10 aa, Homo sapiens
  MISC_FEATURE: 20C3 VH CDR3
WQLAHDAFDI

SEQ ID NO: 1026 - protein, 114 aa, Homo sapiens
DIVMTQTPLSLPVTPGEPASISCRSSQSLLNSVDGSTNLDWYLQKPGQSPQLLIYTLSYRASGVPDRFSGSGSGTDFTLKISRVEAEDVGVYYCMQRIEFPLTFGGGTKVEIKR

SEQ ID NO: 1027 - protein, 120 aa, Homo sapiens
EVQLVESGGGLVQPGGSLRLSCAASGFTFSSYSMNWVRQAPGKGLEWVSYISSSGSSIYYADSVKGRFTISRDNAKNSLYLQMNSLRDEDTAVYYCARERYYGDTPFDYWGQGTLVTVSS

SEQ ID NO: 1028 - protein, 17 aa, Homo sapiens
  MISC_FEATURE: 27H6 VL CDR1
RSSQSLLNSVDGSTNLD

SEQ ID NO: 1029 - protein, 7 aa, Homo sapiens
  MISC_FEATURE: 27H6 VL CDR2
TLSYRAS

SEQ ID NO: 1030 - protein, 9 aa, Homo sapiens
  MISC_FEATURE: 27H6 VL CDR3
MQRIEFPLT

SEQ ID NO: 1031 - protein, 5 aa, Homo sapiens
  MISC_FEATURE: 27H6 VH CDR1
SYSMN

SEQ ID NO: 1032 - protein, 17 aa, Homo sapiens
  MISC_FEATURE: 27H6 VH CDR2
YISSSGSSIYYADSVKG

SEQ ID NO: 1033 - protein, 11 aa, Homo sapiens
  MISC_FEATURE: 27H6 VH CDR3
ERYYGDTPFDY
